(19) United States
(12) Patent Application Publication
(10) Pub. No.: US 2025/0075211 A1
(43) Pub. Date: Mar. 6, 2025

(54) TRANSTHYRETIN (TTR) iRNA COMPOSITIONS AND METHODS OF USE THEREOF FOR TREATING OR PREVENTING TTR-ASSOCIATED DISEASES

(71) Applicant: Alnylam Pharmaceuticals, Inc., Cambridge, MA (US)

(72) Inventors: Tracy Zimmermann, Winchester, MA (US); Amy Chan, Tewksbury, MA (US); Vasant R. Jadhav, Sharon, MA (US); Martin A. Maier, Belmont, MA (US); Kallanthottathil G. Rajeev, Wayland, MA (US)

(21) Appl. No.: 18/744,959

(22) Filed: Jun. 17, 2024

Related U.S. Application Data
(63) Continuation of application No. 17/584,463, filed on Jan. 26, 2022, now Pat. No. 12,049,628.
Application No. 17/584,463 is a continuation of application No. 16/864,226, filed on May 1, 2020, now Pat. No. 11,286,486.
Application No. 16/864,226 is a division of application No. 16/223,362, filed on Dec. 18, 2018, now Pat. No. 10,683,501.
Application No. 16/223,362 is a continuation of application No. 15/221,651, filed on Jul. 28, 2016, now Pat. No. 10,208,307.
(60) Provisional application No. 62/287,518, filed on Jan. 27, 2016.
(60) Provisional application No. 62/199,563, filed on Jul. 31, 2015.

(51) Int. Cl. C12N 15/113

(52) U.S. Cl. CPC C12N 15/113; C12N 2310/14; C12N 2310/315; C12N 2310/322; C12N 2310/344; C12N 2310/351; C12N 2310/3515; C12N 2310/3533; C12N 2320/30

(57) ABSTRACT

The present invention provides iRNA agents, e.g., double stranded iRNA agents, that target the transthyretin (TTR) gene and methods of using such iRNA agents for treating or preventing TTR-associated diseases.

### RELATED APPLICATIONS

[0001] This application is a continuation of U.S. patent application Ser. No. 17/584,463, filed on Jan. 26, 2022, which is a continuation of U.S. patent application Ser. No. 16/864,226, filed on May 1, 2020, now U.S. Pat. No. 11,286,486, issued on Mar. 29, 2022, which is a divisional of U.S. patent application Ser. No. 16/223,362, filed on Dec. 18, 2018, now U.S. Pat. No. 10,683,501, issued on Jun. 16, 2020, which is a continuation of U.S. patent application Ser. No. 15/221,651, filed on Jul. 28, 2016, now U.S. Pat. No. 10,208,307, issued on Feb. 19, 2019, which claims the benefit of priority to U.S. Provisional Patent Application No. 62/199,563, filed on Jul. 31, 2015, and to U.S. Provisional Patent Application No. 62/287,518, filed on Jan. 27, 2016. The entire contents of each of the foregoing applications are hereby incorporated herein by reference.

[0002] This application is related to U.S. Provisional Patent Application No. 61/881,257, filed on Sep. 23, 2013, and International Application No. PCT/US2014/056923, filed Sep. 23, 2014, the entire contents of each of which are hereby incorporated herein by reference. In addition, this application is related to U.S. Provisional Application No. 61/561,710, filed on Nov. 18, 2011, International Application No. PCT/US2012/065601, filed on Nov. 16, 2012, U.S. Provisional Application No. 61/615,618, filed on Mar. 26, 2012, U.S. Provisional Application No. 61/680,098, filed on Aug. 6, 2012, U.S. application Ser. No. 14/358,972, filed on May 16, 2014, now U.S. Pat. No. 9,399,775, issued on Jul. 26, 2016, U.S. application Ser. No. 15/188,317, filed on Jun. 21, 2016, now U.S. Pat. No. 10,570,391, issued on Feb. 25, 2020, U.S. application Ser. No. 16/738,014, filed on Jan. 9, 2020, now abandoned, U.S. application Ser. No. 17/371,182, filed on Jul. 9, 2021, now abandoned, U.S. application Ser. No. 18/509,440, filed on Nov. 15, 2023, and International Application No. PCT/US2012/065691, filed on Nov. 16, 2012. The entire contents of each of the foregoing applications are hereby incorporated herein by reference.

### SEQUENCE LISTING

[0003] The instant application contains a Sequence Listing which has been submitted electronically in XML format and is hereby incorporated by reference in its entirety. Said XML copy, created on Jun. 12, 2024, is named 121301_03007_SL.xml and is 2,604,138 bytes in size.

### BACKGROUND OF THE INVENTION

[0004] Transthyretin (TTR) (also known as prealbumin) is found in serum and cerebrospinal fluid (CSF). TTR transports retinol-binding protein (RBP) and thyroxine (T4) and also acts as a carrier of retinol (vitamin A) through its association with RBP in the blood and the CSF. Transthyretin is named for its transport of thyroxine and retinol. TTR also functions as a protease and can cleave proteins including apoA-I (the major HDL apolipoprotein), amyloid β-peptide, and neuropeptide Y. See Liz, M. A. et al. (2010) IUBMB Life, 62 (6): 429-435.

[0005] TTR is a tetramer of four identical 127-amino acid subunits (monomers) that are rich in beta sheet structure. Each monomer has two 4-stranded beta sheets and the shape of a prolate ellipsoid. Antiparallel beta-sheet interactions link monomers into dimers. A short loop from each monomer forms the main dimer-dimer interaction. These two pairs of loops separate the opposed, convex beta-sheets of the dimers to form an internal channel.

[0006] The liver is the major site of TTR expression. Other significant sites of expression include the choroid plexus, retina (particularly the retinal pigment epithelium) and pancreas.

[0007] Transthyretin is one of at least 27 distinct types of proteins that is a precursor protein in the formation of amyloid fibrils. See Guan, J. et al. (Nov. 4, 2011) Current perspectives on cardiac amyloidosis, Am J Physiol Heart Circ Physiol, doi: 10.1152/ajpheart.00815.2011. Extracellular deposition of amyloid fibrils in organs and tissues is the hallmark of amyloidosis. Amyloid fibrils are composed of misfolded protein aggregates, which may result from either excess production of or specific mutations in precursor proteins. The amyloidogenic potential of TTR may be related to its extensive beta sheet structure; X-ray crystallographic studies indicate that certain amyloidogenic mutations destabilize the tetrameric structure of the protein. Sec, e.g., Saraiva M. J. M. (2002) Expert Reviews in Molecular Medicine, 4(12):1-11.

[0008] Amyloidosis is a general term for the group of amyloid diseases that are characterized by amyloid deposits. Amyloid diseases are classified based on their precursor protein; for example, the name starts with “A” for amyloid and is followed by an abbreviation of the precursor protein, e.g., ATTR for amloidogenic transthyretin. Ibid.

[0009] There are numerous TTR-associated diseases, most of which are amyloid diseases. Normal-sequence TTR is associated with cardiac amyloidosis in people who are elderly and is termed senile systemic amyloidosis (SSA) (also called senile cardiac amyloidosis (SCA) or cardiac amyloidosis). SSA often is accompanied by microscopic deposits in many other organs. TTR amyloidosis manifests in various forms. When the peripheral nervous system is affected more prominently, the disease is termed familial amyloidotic polyneuropathy (FAP). When the heart is primarily involved but the nervous system is not, the disease is called familial amyloidotic cardiomyopathy (FAC). A third major type of TTR amyloidosis is leptomeningeal amyloidosis, also known as leptomeningeal or meningocerebrovascular amyloidosis, central nervous system (CNS) amyloidosis, or amyloidosis VII form. Mutations in TTR may also cause amyloidotic vitreous opacities, carpal tunnel syndrome, and euthyroid hyperthyroxinemia, which is a non-amyloidotic disease thought to be secondary to an increased association of thyroxine with TTR due to a mutant TTR molecule with increased affinity for thyroxine. See, e.g., Moses et al. (1982) J. Clin. Invest., 86, 2025-2033.

[0010] Abnormal amyloidogenic proteins may be either inherited or acquired through somatic mutations. Guan, J. et al. (Nov. 4, 2011) Current perspectives on cardiac amyloidosis, Am J Physiol Heart Circ Physiol, doi: 10.1152/ajpheart.00815.2011. Transthyretin associated ATTR is the most frequent form of hereditary systemic amyloidosis. Lobato, L. (2003) J. Nephrol., 16:438-442. TTR mutations accelerate the process of TTR amyloid formation and are the most important risk factor for the development of ATTR. More than 85 amyloidogenic TTR variants are known to cause systemic familial amyloidosis. TTR mutations usually give rise to systemic amyloid deposition, with particular involvement of the peripheral nervous system, although some mutations are associated with cardiomyopathy or vitreous opacities. Ibid.

[0011] The V30M mutation is the most prevalent TTR mutation. See, e.g., Lobato, L. (2003) J Nephrol, 16:438-442. The V1221 mutation is carried by 3.9% of the African American population and is the most common cause of FAC. Jacobson, D. R. et al. (1997) N. Engl. J. Med. 336 (7): 466-73. It is estimated that SSA affects more than 25% of the population over age 80. Westermark, P. et al. (1990) Proc. Natl. Acad. Sci. U.S.A. 87 (7): 2843-5.

[0012] Accordingly, there is a need in the art for effective treatments for TTR-associated diseases.

### SUMMARY OF THE INVENTION

[0013] The present invention provides RNAi agents, e.g., double stranded RNAi agents, and compositions targeting the Transthyretin (TTR) gene. The present invention also provides methods of inhibiting expression of TTR and methods of treating or preventing a TTR-associated disease in a subject using the RNAi agents, e.g., double stranded RNAi agents, of the invention. The present invention is based, at least in part, on the discovery that RNAi agents in which substantially all of the nucleotides on the sense strand and substantially all of the nucleotides of the antisense strand are modified nucleotides and that comprise no more than 8 2′-fluoro modifications on the sense strand, no more than 6 2′-fluoro modifications on the antisense strand, two phosphorothioate linkages at the 5′-end of the sense strand, two phosphorothioate linkages at the 5′-end of the antisense strand, and a ligand, e.g., a GalNAc₃ ligand, are shown herein to be effective in silencing the activity of the TTR gene. These agents show surprisingly enhanced TTR gene silencing activity. Without intending to be limited by theory, it is believed that a combination or sub-combination of the foregoing modifications and the specific target sites in these RNAi agents confer to the RNAi agents of the invention improved efficacy, stability, potency, and durability.

[0014] Accordingly, in one aspect, the present invention provides double stranded ribonucleic acid (RNAi) agents for inhibiting expression of transthyretin (TTR) in a cell, wherein the RNAi agent comprises a sense strand complementary to an antisense strand, wherein the antisense strand comprises a region complementary to SEQ ID NO:2 (5′-UGGGAUUUCAUGUAACCAAGA-3′), wherein each strand is about 14 to about 30 nucleotides in length, wherein substantially all of the nucleotides of the sense strand and substantially all of the nucleotides of the antisense strand are modified nucleotides, wherein the sense strand comprises no more than 8 2′-fluoro modifications; wherein the antisense strand comprises no more than 6 2′-fluoro modifications; wherein the sense strand and the antisense strand each independently comprise two phosphorothioate linkages at the 5′-terminus; and wherein the sense strand is conjugated to at least one ligand.

[0015] In one embodiment, and wherein the double stranded RNAi agent is represented by formula (IIIe):

sense:
5′-Nₐ-Y Y Y-N_{b}-3′
antisense:
3′-nₚ′-Nₐ′-Y′Y′Y′-N_{b}′-5′
(IIIe)

[0016] wherein:
[0017] nₚ′ is a 2 nucleotide overhang and each nucleotide within np′ is linked to a neighboring nucleotide via a phosphorothioate linkage;
[0018] each Nₐ, N_{b}, Nₐ′ and N_{b}′ independently represents an oligonucleotide sequence comprising 0-25 nucleotides which are either modified or unmodified or combinations thereof, each sequence comprising at least two differently modified nucleotides;
[0019] YYY and Y′Y′Y′ each independently represent one motif of three identical modifications on three consecutive nucleotides.

[0020] In one embodiment, the YYY motif occurs at or near the cleavage site of the sense strand. In one embodiment, the Y′Y′Y′ motif occurs at the 11, 12 and 13 positions of the antisense strand from the 5′-end.

[0021] In one embodiment, the Y nucleotides contain a 2′-fluoro modification.

[0022] In one embodiment, the Y′ nucleotides contain a 2′-O-methyl modification.

[0023] The double stranded region may be 15-30 nucleotide pairs in length, 17-23 nucleotide pairs in length, 17-25 nucleotide pairs in length, 23-27 nucleotide pairs in length, 19-21 nucleotide pairs in length, or 21-23 nucleotide pairs in length.

[0024] Each strand of the double stranded RNAi agent may have 15-30 nucleotides or 19-30 nucleotides.

[0025] In one embodiment, the modifications on the nucleotides are selected from the group consisting of a deoxy-nucleotide, a 3′-terminal deoxy-thymine (dT) nucleotide, a 2′-O-methyl modified nucleotide, a 2′-fluoro modified nucleotide, a 2′-deoxy-modified nucleotide, a locked nucleotide, an unlocked nucleotide, a conformationally restricted nucleotide, a constrained ethyl nucleotide, an abasic nucleotide, a 2′-amino-modified nucleotide, a 2′-O-allyl-modified nucleotide, 2′-C-alkyl-modified nucleotide, 2′-hydroxly-modified nucleotide, a 2′-methoxyethyl modified nucleotide, a 2′-O-alkyl-modified nucleotide, a morpholino nucleotide, a phosphoramidate, a non-natural base comprising nucleotide, a tetrahydropyran modified nucleotide, a 1,5-anhydrohexitol modified nucleotide, a cyclohexenyl modified nucleotide, a nucleotide comprising a phosphorothioate group, a nucleotide comprising a methylphosphonate group, a nucleotide comprising a 5′-phosphate, and a nucleotide comprising a 5′-phosphate mimic, and combinations thereof.

[0026] In one embodiment, the modifications on the nucleotides are 2′-O-methyl or 2′-fluoro modifications.

[0027] The sense strand may comprise no more than 7 2′-fluoro modifications, no more than 6 2′-fluoro modifications, no more than 5 2′-fluoro modification, no more than 4 2′-fluoro modifications, no more than 3 2′-fluoro modifications, or no more than 2 2′-fluoro modifications.

[0028] The antisense strand may comprise no more than 5 2′-fluoro modifications, no more than 4 2′-fluoro modifications, no more than 3 2′-fluoro modifications, or no more than 2 2′-fluoro modifications.

[0029] In one embodiment, the double stranded RNAi agent further comprises a 5′-phosphate or a 5′-phosphate mimic at the 5′ nucleotide of the antisense strand. In another embodiment, the double stranded RNAi agent further comprises a 5′-phosphate mimic at the 5′ nucleotide of the antisense strand.

[0030] In one embodiment, the 5′-phosphate mimic is a 5′-vinyl phosphate (5′-VP).

[0031] In one embodiment, the ligand is one or more GalNAc derivatives attached through a bivalent or trivalent branched linker. In another embodiment, the ligand is

[chemical structure]

[0032] In one embodiment, the ligand is attached to the 3′ end of the sense strand.

[0033] In one embodiment, the double stranded RNAi agent is conjugated to the ligand as shown in the following schematic

[chemical structure]

wherein X is O or S.

[0034] In one embodiment, the antisense strands comprise a nucleotide sequence selected from the group consisting of
[0035] 5′-usCfsuugguuacaugAfaaucccasusc-3′ (SEQ ID NO: 6),
[0036] 5′-usCfsuugGfuuAfcaugAfaAfucccasusc-3′ (SEQ ID NO:7),
[0037] 5′-UfsCfsuugGfuuAfcaugAfaAfucccasusc-3′ (SEQ ID NO: 8), and
[0038] 5′-VPusCfsuugGfuuAfcaugAfaAfucccasusc-3′ (SEQ ID NO: 9), wherein a, c, g, and u are 2′-O-methyl (2′-OMe) A, C, G, or U; Af, Cf, Gf, and Uf are 2′-fluoro A, C, G, or U; and s is a phosphorothioate linkage; and VP is a 5′-phosphate mimic.

[0039] In one embodiment, the sense and antisense strands comprise nucleotide sequences selected from the group consisting of
[0040] 5′-usgsggauUfuCfAfUfguaaccaaga-3′ (SEQ ID NO: 10) and
[0041] 5′-usCfsuugguuacaugAfaaucccasusc-3′ (SEQ ID NO: 6);
[0042] 5′-usgsggauUfuCfAfUfguaaccaaga-3′ (SEQ ID NO: 10) and
[0043] 5′-usCfsuugGfuuAfcaugAfaAfucccasusc-3′ (SEQ ID NO: 7);
[0044] 5′-usgsggauUfuCfAfUfguaaccaaga-3′ (SEQ ID NO: 10) and
[0045] 5′-UfsCfsuugGfuuAfcaugAfaAfucccasusc-3′ (SEQ ID NO: 8); and
[0046] 5′-usgsggauUfuCfAfUfguaaccaaga-3′ (SEQ ID NO: 10) and
[0047] 5′-VPusCfsuugGfuuAfcaugAfaAfucccasusc-3′ (SEQ ID NO: 9), wherein a, c, g, and u are 2′-O-methyl (2′-OMe) A, C, G, or U; Af, Cf, Gf, and Uf are 2′-fluoro A, C, G, or U; and s is a phosphorothioate linkage; and VP is a 5′-phosphate mimic. In another embodiment, the sense and antisense strands comprise the nucleotide sequences 5′-usgsggauUfuCfAfUfguaaccaaga-3′ (SEQ ID NO: 10) and
[0048] 5′-usCfsuugGfuuAfcaugAfaAfucccasusc-3′ (SEQ ID NO: 7), wherein a, c, g, and u are 2′-O-methyl (2′-OMe) A, C, G, or U; Af, Cf, Gf, and Uf are 2′-fluoro A, C, G, or U; and s is a phosphorothioate linkage. In yet another embodiment, the RNAi agent is selected from the group of any one of the RNAi agents listed in any one of Tables 1 and 3. In yet another embodiment, the RNAi agent is AD-65492.

[0049] In one aspect, the present invention provides double stranded ribonucleic acid (RNAi) agents for inhibiting expression of transthyretin (TTR) in a cell, wherein the RNAi agent comprises a sense strand complementary to an antisense strand, wherein the antisense strand comprises a region fully complementary to SEQ ID NO:2 (5′-UGGGAUUUCAUGUAACCAAGA-3′), wherein each strand is about 14 to about 30 nucleotides in length, wherein substantially all of the nucleotides of the sense strand and substantially all of the nucleotides of the antisense strand are modified nucleotides, wherein the sense strand comprises no more than 8 2′-fluoro modifications; wherein the antisense strand comprises no more than 6 2′-fluoro modifications; wherein the sense strand and the antisense strand each independently comprise two phosphorothioate linkages at the 5′-terminus; and wherein the sense strand is conjugated to at least one ligand, wherein the ligand is one or more GalNAc derivatives attached through a bivalent or trivalent branched linker.

[0050] In one embodiment, the double stranded RNAi agent is represented by formula (IIIe):

sense:
5′-Nₐ-Y Y Y-N_{b}-3′
antisense:
3′-nₚ′-Nₐ′-Y′Y′Y′-N_{b}′-5′
(IIIe)

[0051] wherein:
[0052] nₚ′ is a 2 nucleotide overhang and each nucleotide within nₚ′ is linked to a neighboring nucleotide via a phosphorothioate linkage;
[0053] each Nₐ, N_{b}, Nₐ′ and N_{b}′ independently represents an oligonucleotide sequence comprising 8-10 nucleotides which are either modified or unmodified or combinations thereof, each sequence comprising at least two differently modified nucleotides;

[0054] YYY and Y′Y′Y′ each independently represent one motif of three identical modifications on three consecutive nucleotides, and wherein the modifications are 2′-O-methyl or 2′-fluoro modifications.

[0055] The present invention also provides cells containing the double stranded RNAi agents of the invention, cells comprising the vectors of the invention, and pharmaceutical compositions comprising the double stranded RNAi agents of the invention or the vectors of the invention.

[0056] In one embodiment, the double stranded RNAi agent is administered in an unbuffered solution, e.g., saline or water.

[0057] In another embodiment, the double stranded RNAi agent is administered with a buffer solution. In one embodiment, the buffer solution comprises acetate, citrate, prolamine, carbonate, or phosphate or any combination thereof. In another embodiment, the buffer solution is phosphate buffered saline (PBS).

[0058] In another aspect, the present invention provides methods of inhibiting transthyretin (TTR) expression in a cell. The methods include (a) contacting the cell with the double stranded RNAi agents of the invention, the vectors of the invention, or the pharmaceutical compositions of the invention; and (b) maintaining the cell produced in step (a) for a time sufficient to obtain degradation of the mRNA transcript of a TTR gene, thereby inhibiting expression of the TTR gene in the cell.

[0059] In one embodiment, the cell is within a subject.

[0060] In one embodiment, the subject is a human.

[0061] In one embodiment, the subject suffers from TTR-associated disease.

[0062] In one embodiment, the TTR expression is inhibited by at least about 10%, about 15%, about 20%, about 25%, about 30%, about 40%, about 50%, about 60%, about 70%, about 80%, about 90%, about 95%, about 98% or about 100%.

[0063] In yet another aspect, the present invention provides methods of treating a subject having a transthyretin (TTR)-associated disorder, by administering to the subject a therapeutically effective amount of the double stranded RNAi agents of the invention, or the vectors of the invention, or the pharmaceutical compositions of the invention, thereby treating the subject.

[0064] In yet another aspect, the present invention provides methods of prophylactically treating a subject at risk of developing a transthyretin (TTR)-associated disorder, by administering to the subject a prophylactically effective amount of the double stranded RNAi agents of the invention, or the vectors of the invention, or the pharmaceutical compositions of the invention, thereby prophylactically treating the subject.

[0065] In a further aspect, the present invention provides methods of treating a subject having a transthyretin (TTR)-associated disorder. The methods include administering to the subject a therapeutically effective amount of a double stranded RNAi agent, wherein the double stranded RNAi agent comprises a sense strand complementary to an antisense strand, wherein the antisense strand comprises a region complementary to SEQ ID NO: 2 (5′-UGGGAUUUCAUGUAACCAAGA-3′), wherein each strand is about 14 to about 30 nucleotides in length, wherein substantially all of the nucleotides of the sense strand and substantially all of the nucleotides of the antisense strand are modified nucleotides, wherein the sense strand comprises no more than 8 2′-fluoro modifications; wherein the antisense strand comprises no more than 6 2′-fluoro modifications; wherein the sense strand and the antisense strand each independently comprise two phosphorothioate linkages at the 5′-terminus; and wherein the sense strand is conjugated to at least one ligand.

[0066] In a further aspect, the present invention provides methods of prophylactically treating a subject at risk of developing a transthyretin (TTR)-associated disorder. The methods include administering to the subject a prophylactically effective amount of a double stranded RNAi agent, wherein the double stranded RNAi agent comprises a sense strand complementary to an antisense strand, wherein the antisense strand comprises a region complementary to SEQ ID NO:2 (5′-UGGGAUUUCAUGUAACCAAGA-3′), wherein each strand is about 14 to about 30 nucleotides in length, wherein substantially all of the nucleotides of the sense strand and substantially all of the nucleotides of the antisense strand are modified nucleotides, wherein the sense strand comprises no more than 8 2′-fluoro modifications; wherein the antisense strand comprises no more than 6 2′-fluoro modifications; wherein the sense strand and the antisense strand each independently comprise two phosphorothioate linkages at the 5′-terminus; and wherein the sense strand is conjugated to at least one ligand.

[0067] In one aspect, the present invention provides methods of reducing, slowing, or arresting a Neuropathy Impairment Score (NIS) or a modified NIS (mNIS+7) in a subject having a transthyretin (TTR)-associated disorder. The methods include administering to the subject a therapeutically effective amount of the double stranded RNAi agents of the invention, or the vectors of the invention, or the pharmaceutical compositions of the invention, thereby reducing, slowing, or arresting a Neuropathy Impairment Score (NIS) or a modified NIS (mNIS+7) in the subject.

[0068] In a further aspect, the present invention provides methods of reducing, slowing, or arresting a Neuropathy Impairment Score (NIS) or a modified NIS (mNIS+7) a subject having a transthyretin (TTR)-associated disorder. The methods include administering to the subject a therapeutically effective amount of a double stranded RNAi agent, wherein the double stranded RNAi agent comprises a sense strand complementary to an antisense strand, wherein said antisense strand comprises a region complementary to SEQ ID NO:2, wherein each strand is about 14 to about 30 nucleotides in length, wherein substantially all of the nucleotides of the sense strand and substantially all of the nucleotides of the antisense strand are modified nucleotides, wherein the sense strand comprises no more than 8 2′-fluoro modifications; wherein the antisense strand comprises no more than 6 2′-fluoro modifications; wherein the sense strand and the antisense strand each independently comprise two phosphorothioate linkages at the 5′-terminus; and wherein the sense strand is conjugated to at least one ligand.

[0069] In one aspect, the present invention provides methods of increasing a 6-minute walk test (6MWT) in a subject having a transthyretin (TTR)-associated disorder. The methods include administering to the subject a therapeutically effective amount of the the double stranded RNAi agents of the invention, or the vectors of the invention, or the pharmaceutical compositions of the invention, thereby increasing a 6-minute walk test (6MWT) in the subject.

[0070] In a further aspect, the present invention provides methods of increasing a 6-minute walk test (6MWT) in a subject having a transthyretin (TTR)-associated disorder. The methods include administering to the subject a therapeutically effective amount of a double stranded RNAi agent, wherein the double stranded RNAi agent comprises a sense strand complementary to an antisense strand, wherein said antisense strand comprises a region complementary to SEQ ID NO:2, wherein each strand is about 14 to about 30 nucleotides in length, wherein substantially all of the nucleotides of the sense strand and substantially all of the nucleotides of the antisense strand are modified nucleotides, wherein the sense strand comprises no more than 8 2′-fluoro modifications; wherein the antisense strand comprises no more than 6 2′-fluoro modifications; wherein the sense strand and the antisense strand each independently comprise two phosphorothioate linkages at the 5′-terminus; and wherein the sense strand is conjugated to at least one ligand.

[0071] In one embodiment, the double stranded RNAi agent is represented by formula (IIIe):

sense:
5′-Nₐ-Y Y Y-N_{b}-3′
antisense:
3′-nₚ′-Nₐ′-Y′Y′Y′-N_{b}′-5′
(IIIe)

[0072] wherein:
[0073] nₚ′ is a 2 nucleotide overhang and each nucleotide within nₚ′ is linked to a neighboring nucleotide via a phosphorothioate linkage;
[0074] each Nₐ, N_{b}, N_{b} and N_{b}′ independently represents an oligonucleotide sequence comprising 0-25 nucleotides which are either modified or unmodified or combinations thereof, each sequence comprising at least two differently modified nucleotides;
[0075] YYY and Y′Y′Y′ each independently represent one motif of three identical modifications on three consecutive nucleotides.

[0076] In one embodiment, the subject is a human.

[0077] In one embodiment, the subject is a subject suffering from a TTR-associated disease. In another embodiment, the subject is a subject at risk for developing a TTR-associated disease. In one embodiment, the subject at risk of developing a TTR-associated disease carries a TTR gene mutation that is associated with the development of a TTR associated disease, or a subject with a family history of TTR-associated disease, or a subject who has signs or symptoms suggesting the development of TTR amyloidosis.

[0078] In one embodiment, the TTR-associated disease is selected from the group consisting of senile systemic amyloidosis (SSA), systemic familial amyloidosis, familial amyloidotic polyneuropathy (FAP), familial amyloidotic cardiomyopathy (FAC), leptomeningeal/Central Nervous System (CNS) amyloidosis, and hyperthyroxinemia.

[0079] In one embodiment, the subject has a TTR-associated amyloidosis and the method reduces an amyloid TTR deposit in the subject.

[0080] In one embodiment, the double stranded RNAi agent is administered to the subject by an administration means selected from the group consisting of subcutaneous, intravenous, intramuscular, intrabronchial, intrapleural, intraperitoneal, intraarterial, lymphatic, cerebrospinal, and any combinations thereof. In another embodiment, the double stranded RNAi agent is administered to the subject via subcutaneous, intramuscular or intravenous administration. In yet another embodiment, the double stranded RNAi agent is administered to the subject via subcutaneous administration.

[0081] In one embodiment, the methods further comprise assessing the level of TTR mRNA expression or TTR protein expression in a sample derived from the subject.

[0082] In one embodiment, administering the double stranded RNAi agent does not result in an inflammatory response in the subject as assessed based on the level of a cytokine or chemokine selected from the group consisting of G-CSF, IFN-γ, IL-10, IL-12 (p70), IL1β, IL-1ra, IL-6, IL-8, IP-10, MCP-1, MIP-1α, MIP-1β, TNFα, and any combinations thereof, in a sample from the subject.

[0083] In one aspect, the present invention provides methods of treating a subject having a transthyretin (TTR)-associated disorder. The methods include administering to the subject a fixed dose of about 12.5 mg to about 200 mg (e.g., about 12.5 mg, about 25 mg, about 50 mg, about 75 mg, about 100 mg, about 125 mg, about 150 mg, about 175 mg, or about 200 mg) of a double stranded RNAi agent, wherein the double stranded RNAi agent comprises a sense strand complementary to an antisense strand, wherein the antisense strand comprises a region complementary to SEQ ID NO:2 (5′-UGGGAUUUCAUGUAACCAAGA-3′), wherein each strand is about 14 to about 30 nucleotides in length, wherein substantially all of the nucleotides of the sense strand and substantially all of the nucleotides of the antisense strand are modified nucleotides, wherein the sense strand comprises no more than 8 2′-fluoro modifications; wherein the antisense strand comprises no more than 6 2′-fluoro modifications; wherein the sense strand and the antisense strand each independently comprise two phosphorothioate linkages at the 5′-terminus; and wherein the sense strand is conjugated to at least one ligand.

[0084] In another aspect, the present invention provides methods of prophylactically treating a subject at risk of developing a transthyretin (TTR)-associated disorder. The methods include administering to the subject a fixed dose of about 12.5 mg to about 200 mg (e.g., about 12.5 mg, about 25 mg, about 50 mg, about 75 mg, about 100 mg, about 125 mg, about 150 mg, about 175 mg, or about 200 mg) of a double stranded RNAi agent, wherein the double stranded RNAi agent comprises a sense strand complementary to an antisense strand, wherein the antisense strand comprises a region complementary to SEQ ID NO:2 (5′-UGGGAUUUCAUGUAACCAAGA-3′), wherein each strand is about 14 to about 30 nucleotides in length, wherein substantially all of the nucleotides of the sense strand and substantially all of the nucleotides of the antisense strand are modified nucleotides, wherein the sense strand comprises no more than 8 2′-fluoro modifications; wherein the antisense strand comprises no more than 6 2′-fluoro modifications; wherein the sense strand and the antisense strand each independently comprise two phosphorothioate linkages at the 5′-terminus; and wherein the sense strand is conjugated to at least one ligand.

[0085] In one aspect, the present invention provides methods of treating a subject having a transthyretin (TTR)-associated disorder. The methods include administering to the subject a dose of about 0.15 mg/kg to about 2.5 mg/kg (e.g., about 0.15 mg/kg, about 0.3 mg/kg, about 0.6 mg/kg, about 1 mg/kg, about 1.25 mg/kg, about 2 mg/kg, about 2.5 mg/kg, or about 3 mg/kg) of a double stranded RNAi agent, wherein the double stranded RNAi agent comprises a sense strand complementary to an antisense strand, wherein the antisense strand comprises a region complementary to SEQ ID NO:2 (5′-UGGGAUUUCAUGUAACCAAGA-3′), wherein each strand is about 14 to about 30 nucleotides in length, wherein substantially all of the nucleotides of the sense strand and substantially all of the nucleotides of the antisense strand are modified nucleotides, wherein the sense strand comprises no more than 8 2′-fluoro modifications; wherein the antisense strand comprises no more than 6 2′-fluoro modifications; wherein the sense strand and the antisense strand each independently comprise two phosphorothioate linkages at the 5′-terminus; and wherein the sense strand is conjugated to at least one ligand.

[0086] In one aspect, the present invention provides methods of prophylactically treating a subject at risk of developing a transthyretin (TTR)-associated disorder. The methods include administering to the subject a dose of about 0.15 mg/kg to about 2.5 mg/kg (e.g., about 0.15 mg/kg, about 0.3 mg/kg, about 0.6 mg/kg, about 1 mg/kg, about 1.25 mg/kg, about 2 mg/kg, about 2.5 mg/kg, or about 3 mg/kg) of a double stranded RNAi agent, wherein the double stranded RNAi agent comprises a sense strand complementary to an antisense strand, wherein the antisense strand comprises a region complementary to SEQ ID NO:2 (5′-UGGGAUUUCAUGUAACCAAGA-3′), wherein each strand is about 14 to about 30 nucleotides in length, wherein substantially all of the nucleotides of the sense strand and substantially all of the nucleotides of the antisense strand are modified nucleotides, wherein the sense strand comprises no more than 8 2′-fluoro modifications; wherein the antisense strand comprises no more than 6 2′-fluoro modifications; wherein the sense strand and the antisense strand each independently comprise two phosphorothioate linkages at the 5′-terminus; and wherein the sense strand is conjugated to at least one ligand.

[0087] In another aspect, the present invention provides methods of reducing, slowing, or arresting a Neuropathy Impairment Score (NIS) or a modified NIS (mNIS+7) in a subject having a transthyretin (TTR)-associated disorder. The methods include administering to the subject a dose of about 0.15 mg/kg to about 2.5 mg/kg (e.g., about 0.15 mg/kg, about 0.3 mg/kg, about 0.6 mg/kg, about 1 mg/kg, about 1.25 mg/kg, about 2 mg/kg, about 2.5 mg/kg, or about 3 mg/kg) of a double stranded RNAi agent, wherein the double stranded RNAi agent comprises a sense strand complementary to an antisense strand, wherein the antisense strand comprises a region complementary to SEQ ID NO:2 (5′-UGGGAUUUCAUGUAACCAAGA-3′), wherein each strand is about 14 to about 30 nucleotides in length, wherein substantially all of the nucleotides of the sense strand and substantially all of the nucleotides of the antisense strand are modified nucleotides, wherein the sense strand comprises no more than 8 2′-fluoro modifications; wherein the antisense strand comprises no more than 6 2′-fluoro modifications; wherein the sense strand and the antisense strand each independently comprise two phosphorothioate linkages at the 5′-terminus; and wherein the sense strand is conjugated to at least one ligand.

[0088] In yet another aspect, the present invention provides methods of increasing a 6-minute walk test (6MWT) in a subject having a transthyretin (TTR)-associated disorder. The methods include administering to the subject a dose of about 0.15 mg/kg to about 2.5 mg/kg (e.g., about 0.15 mg/kg, about 0.3 mg/kg, about 0.6 mg/kg, about 1 mg/kg, about 1.25 mg/kg, about 2 mg/kg, about 2.5 mg/kg, or about 3 mg/kg) of a double stranded RNAi agent, wherein the double stranded RNAi agent comprises a sense strand complementary to an antisense strand, wherein the antisense strand comprises a region complementary to SEQ ID NO:2 (5′-UGGGAUUUCAUGUAACCAAGA-3′), wherein each strand is about 14 to about 30 nucleotides in length, wherein substantially all of the nucleotides of the sense strand and substantially all of the nucleotides of the antisense strand are modified nucleotides, wherein the sense strand comprises no more than 8 2′-fluoro modifications; wherein the antisense strand comprises no more than 6 2′-fluoro modifications; wherein the sense strand and the antisense strand each independently comprise two phosphorothioate linkages at the 5′-terminus; and wherein the sense strand is conjugated to at least one ligand.

[0089] In one aspect, the present invention provides methods of treating a subject having a transthyretin (TTR)-associated disorder. The methods include administering to the subject a fixed dose of about 10 mg to about 600 mg, about 25 mg to about 500 mg, about 50 mg to about 500 mg, or about 80 mg to about 500 mg, about 25 mg to about 300 mg, about 50 mg to about 300 mg, or about 80 mg to about 300 mg (e.g., about 10, about 20, about 30, about 40, about 50, about 60, about 70, about 75, about 80, about 90, about 100, about 110, about 120, about 125, about 130, about 140, about 150, about 160, about 170, about 175, about 180, about 190, about 200, about 210, about 220, about 225, about 230, about 240, about 250, about 260, about 270, about 275, about 280, about 290, about 300, about 310, about 320, about 325, about 330, about 340, about 350, about 360, about 370, about 375, about 380, about 390, about 400, about 410, about 420, about 425, about 430, about 440, about 450, about 460, about 470, about 475, about 480, about 490, about 500, about 510, about 520, about 525, about 530, about 540, about 550, about 560, about 570, about 575, about 580, about 590, or about 600 mg) of a double stranded RNAi agent, wherein the double stranded RNAi agent comprises a sense strand complementary to an antisense strand, wherein the antisense strand comprises a region complementary to SEQ ID NO:2 (5′-UGGGAUUUCAUGUAACCAAGA-3′), wherein each strand is about 14 to about 30 nucleotides in length, wherein substantially all of the nucleotides of the sense strand and substantially all of the nucleotides of the antisense strand are modified nucleotides, wherein the sense strand comprises no more than 8 2′-fluoro modifications; wherein the antisense strand comprises no more than 6 2′-fluoro modifications; wherein the sense strand and the antisense strand each independently comprise two phosphorothioate linkages at the 5′-terminus; and wherein the sense strand is conjugated to at least one ligand.

[0090] In one aspect, the present invention provides methods of prophylactically treating a subject at risk of developing a transthyretin (TTR)-associated disorder. The methods include administering to the subject a fixed dose of about 10 mg to about 600 mg, about 25 mg to about 500 mg, about 50 mg to about 500 mg, or about 80 mg to about 500 mg, about 25 mg to about 300 mg, about 50 mg to about 300 mg, or about 80 mg to about 300 mg (e.g., about 10, about 20, about 30, about 40, about 50, about 60, about 70, about 75, about 80, about 90, about 100, about 110, about 120, about 125, about 130, about 140, about 150, about 160, about 170, about 175, about 180, about 190, about 200, about 210, about 220, about 225, about 230, about 240, about 250, about 260, about 270, about 275, about 280, about 290, about 300, about 310, about 320, about 325, about 330, about 340, about 350, about 360, about 370, about 375, about 380, about 390, about 400, about 410, about 420, about 425, about 430, about 440, about 450, about 460, about 470, about 475, about 480, about 490, about 500, about 510, about 520, about 525, about 530, about 540, about 550, about 560, about 570, about 575, about 580, about 590, or about 600 mg) of a double stranded RNAi agent, wherein the double stranded RNAi agent comprises a sense strand complementary to an antisense strand, wherein the antisense strand comprises a region complementary to SEQ ID NO:2 (5′-UGGGAUUUCAUGUAACCAAGA-3′), wherein each strand is about 14 to about 30 nucleotides in length, wherein substantially all of the nucleotides of the sense strand and substantially all of the nucleotides of the antisense strand are modified nucleotides, wherein the sense strand comprises no more than 8 2′-fluoro modifications; wherein the antisense strand comprises no more than 6 2′-fluoro modifications; wherein the sense strand and the antisense strand each independently comprise two phosphorothioate linkages at the 5′-terminus; and wherein the sense strand is conjugated to at least one ligand.

[0091] In another aspect, the present invention provides methods of reducing, slowing, or arresting a Neuropathy Impairment Score (NIS) or a modified NIS (mNIS+7) in a subject having a transthyretin (TTR)-associated disorder. The methods include administering to the subject a fixed dose of about 10 mg to about 600 mg, about 25 mg to about 500 mg, about 50 mg to about 500 mg, or about 80 mg to about 500 mg, about 25 mg to about 300 mg, about 50 mg to about 300 mg, or about 80 mg to about 300 mg (e.g., about 10, about 20, about 30, about 40, about 50, about 60, about 70, about 75, about 80, about 90, about 100, about 110, about 120, about 125, about 130, about 140, about 150, about 160, about 170, about 175, about 180, about 190, about 200, about 210, about 220, about 225, about 230, about 240, about 250 mg, about 260, about 270, about 275, about 280, about 290, about 300, about 310, about 320, about 325, about 330, about 340, about 350, about 360, about 370, about 375, about 380, about 390, about 400, about 410, about 420, about 425, about 430, about 440, about 450 mg, about 460, about 470, about 475, about 480, about 490, about 500, about 510, about 520, about 525, about 530, about 540, about 550, about 560, about 570, about 575, about 580, about 590, or about 600 mg) of a double stranded RNAi agent, wherein the double stranded RNAi agent comprises a sense strand complementary to an antisense strand, wherein the antisense strand comprises a region complementary to SEQ ID NO:2 (5′-UGGGAUUUCAUGUAACCAAGA-3′), wherein each strand is about 14 to about 30 nucleotides in length, wherein substantially all of the nucleotides of the sense strand and substantially all of the nucleotides of the antisense strand are modified nucleotides, wherein the sense strand comprises no more than 8 2′-fluoro modifications; wherein the antisense strand comprises no more than 6 2′-fluoro modifications; wherein the sense strand and the antisense strand each independently comprise two phosphorothioate linkages at the 5′-terminus; and wherein the sense strand is conjugated to at least one ligand.

[0092] In yet another aspect, the present invention provides methods of increasing a 6-minute walk test (6MWT) in a subject having a transthyretin (TTR)-associated disorder. The methods include administering to the subject a fixed dose of about 10 mg to about 600 mg, about 25 mg to about 500 mg, about 50 mg to about 500 mg, or about 80 mg to about 500 mg, about 25 mg to about 300 mg, about 50 mg to about 300 mg, or about 80 mg to about 300 mg (e.g., about 10, about 20, about 30, about 40, about 50, about 60, about 70, about 75, about 80, about 90, about 100, about 110, about 120, about 125, about 130, about 140, about 150, about 160, about 170, about 175, about 180, about 190, about 200, about 210, about 220, about 225, about 230, about 240, about 250 mg, about 260, about 270, about 275, about 280, about 290, about 300, about 310, about 320, about 325, about 330, about 340, about 350, about 360, about 370, about 375, about 380, about 390, about 400, about 410, about 420, about 425, about 430, about 440, about 450 mg, about 460, about 470, about 475, about 480, about 490, about 500, about 510, about 520, about 525, about 530, about 540, about 550, about 560, about 570, about 575, about 580, about 590, or about 600 mg) of a double stranded RNAi agent, wherein the double stranded RNAi agent comprises a sense strand complementary to an antisense strand, wherein the antisense strand comprises a region complementary to SEQ ID NO:2 (5′-UGGGAUUUCAUGUAACCAAGA-3′), wherein each strand is about 14 to about 30 nucleotides in length, wherein substantially all of the nucleotides of the sense strand and substantially all of the nucleotides of the antisense strand are modified nucleotides, wherein the sense strand comprises no more than 8 2′-fluoro modifications; wherein the antisense strand comprises no more than 6 2′-fluoro modifications; wherein the sense strand and the antisense strand each independently comprise two phosphorothioate linkages at the 5′-terminus; and wherein the sense strand is conjugated to at least one ligand.

[0093] In one embodiment, the double stranded RNAi agent is represented by formula (IIIe):

sense:
5′-Nₐ-Y Y Y-N_{b}-3′
antisense:
3′-nₚ′-Nₐ′-Y′Y′Y′-N_{b}′-5′
(IIIe)

[0094] wherein:
[0095] nₚ′ is a 2 nucleotide overhang and each nucleotide within nₚ′ is linked to a neighboring nucleotide via a phosphorothioate linkage;
[0096] each Nₐ, N_{b}, N_{b} and N_{b}′ independently represents an oligonucleotide sequence comprising 0-25 nucleotides which are either modified or unmodified or combinations thereof, each sequence comprising at least two differently modified nucleotides;
[0097] YYY and Y′Y′Y′ each independently represent one motif of three identical modifications on three consecutive nucleotides.

[0098] In one embodiment, the antisense strand comprises a nucleotide sequence selected from the group consisting of
[0099] 5′-usCfsuugguuacaugAfaaucccasusc-3′ (SEQ ID NO: 6),
[0100] 5′-usCfsuugGfuuAfcaugAfaAfucccasusc-3′ (SEQ ID NO: 7),
[0101] 5′-UfsCfsuugGfuuAfcaugAfaAfucccasusc-3′ (SEQ ID NO: 8), and
[0102] 5′-VPusCfsuugGfuuAfcaugAfaAfucccasusc-3′ (SEQ ID NO: 9), wherein a, c, g, and u are 2′-O-methyl (2′-OMe) A, C, G, or U; Af, Cf, Gf, and Uf are 2′-fluoro A, C, G, or U; s is a phosphorothioate linkage; and VP is a 5′-phosphate mimic.

[0103] In one embodiment, the sense and antisense strands comprise nucleotide sequences selected from the group consisting of
[0104] 5′-usgsggauUfuCfAfUfguaaccaaga-3′ (SEQ ID NO: 10) and
[0105] 5′-usCfsuugguuacaugAfaaucccasusc-3′ (SEQ ID NO: 6);
[0106] 5′-usgsggauUfuCfAfUfguaaccaaga-3′ (SEQ ID NO: 10) and
[0107] 5′-usCfsuugGfuuAfcaugAfaAfucccasusc-3′ (SEQ ID NO: 7);
[0108] 5′-usgsggauUfuCfAfUfguaaccaaga-3′ (SEQ ID NO: 10) and
[0109] 5′-UfsCfsuugGfuuAfcaugAfaAfucccasusc-3′ (SEQ ID NO: 8); and
[0110] 5′-usgsggauUfuCfAfUfguaaccaaga-3′ (SEQ ID NO: 10) and
[0111] 5′-VPusCfsuugGfuuAfcaugAfaAfucccasusc-3′ (SEQ ID NO: 9), wherein a, c, g, and u are 2′-O-methyl (2′-OMe) A, C, G, or U; Af, Cf, Gf, and Uf are 2′-fluoro A, C, G, or U; and s is a phosphorothioate linkage; and VP is a 5′-phosphate mimic.

[0112] In one embodiment, the sense and antisense strands comprise the nucleotide sequences

(SEQ ID NO: 10)
5′- usgsggauUfuCfAfUfguaaccaaga - 3′
and
(SEQ ID NO: 7)
5′- usCfsuugGfuuAfcaugAfaAfucccasusc - 3′,

[0113] wherein a, c, g, and u are 2′-O-methyl (2′-OMe) A, C, G, or U; Af, Cf, Gf, and Uf are 2′-fluoro A, C, G, or U; and s is a phosphorothioate linkage.

[0114] The fixed dose of the double stranded RNAi agent may be administered to the subject once about every 4 weeks, every 5 weeks, every six weeks, every eight weeks or quarterly.

[0115] The dose of the double stranded RNAi agent may be administered to the subject once about every 4 weeks, every 5 weeks, every six weeks, every eight weeks or quarterly.

[0116] In one embodiment, the double stranded RNAi agent is administered to the subject about once every quarter.

[0117] In one embodiment, the double stranded RNAi agent is chronically administered to the subject.

[0118] In one embodiment, the subject is a human.

[0119] In one embodiment, the subject is a subject suffering from a TTR-associated disease. In another embodiment, the subject is a subject at risk for developing a TTR-associated disease. In one embodiment, the subject at risk of developing a TTR-associated disease carries a TTR gene mutation that is associated with the development of a TTR associated disease, or a subject with a family history of TTR-associated disease, or a subject who has signs or symptoms suggesting the development of TTR amyloidosis.

[0120] In one embodiment, the TTR-associated disease is selected from the group consisting of senile systemic amyloidosis (SSA), systemic familial amyloidosis, familial amyloidotic polyneuropathy (FAP), familial amyloidotic cardiomyopathy (FAC), leptomeningeal/Central Nervous System (CNS) amyloidosis, and hyperthyroxinemia.

[0121] In one embodiment, the subject has a TTR-associated amyloidosis and the method reduces an amyloid TTR deposit in the subject.

[0122] In one embodiment, the double stranded RNAi agent is administered to the subject by an administration means selected from the group consisting of subcutaneous, intravenous, intramuscular, intrabronchial, intrapleural, intraperitoneal, intraarterial, lymphatic, cerebrospinal, and any combinations thereof. In another embodiment, the double stranded RNAi agent is administered to the subject via subcutaneous, intramuscular or intravenous administration. In yet another embodiment, the double stranded RNAi agent is administered to the subject via subcutaneous administration, e.g., via self administration, e.g., via a pre-filled syringe or auto-injector syringe.

[0123] In one embodiment, the methods further comprise assessing the level of TTR mRNA expression or TTR protein expression in a sample derived from the subject.

[0124] In one embodiment, administering the double stranded RNAi agent does not result in an inflammatory response in the subject as assessed based on the level of a cytokine or chemokine selected from the group consisting of G-CSF, IFN-γ, IL-10, IL-12 (p70), IL1β, IL-1ra, IL-6, IL-8, IP-10, MCP-1, MIP-1α, MIP-1β, TNFα, and any combinations thereof, in a sample from the subject.

[0125] In one embodiment, the agent suitable for use in the methods of the invention is AD-65492. AD-65492 may be chronically administered to the subject every 4 weeks, every 5 weeks, or every six weeks, or every quarter.

[0126] In one aspect, the present invention provides double stranded ribonucleic acid (RNAi) agents for use in inhibiting expression of transthyretin (TTR) in a cell. The agents include a sense strand complementary to an antisense strand, wherein the sense and antisense strands comprise nucleotide sequences selected from the group consisting of any of the nucleotide sequences in Table 5.

[0127] In another aspect, the present invention provides double stranded ribonucleic acid (RNAi) agents for use in inhibiting expression of transthyretin (TTR) in a cell. The agents include a sense strand complementary to an antisense strand, the antisense strand comprising a region of complementarity which comprises at least 15 contiguous nucleotides differing no more than 3 nucleotides from any one of the antisense sequences in Table 6, wherein substantially all of the nucleotides of the sense strand and substantially all of the nucleotides of the antisense strand are modified nucleotides; and wherein the sense strand is conjugated to at least one ligand.

[0128] The sense and antisense strand may comprise nucleotide sequences selected from the group consisting of any of the nucleotide sequences in Table 6 or Table 7.

[0129] In one aspect the present invention provides double stranded ribonucleic acid (RNAi) agents for use in inhibiting expression of transthyretin (TTR) in a cell, wherein the RNAi agents comprise a sense strand complementary to an antisense strand, wherein the sense strand comprises the nucleotide sequence 5′-usgsggauUfuCfAfUfguaaccaaga-3′ (SEQ ID NO: 10) and the antisense strand comprises the nucleotide sequence 5′-usCfsuugGfuuAfcaugAfaAfucccasusc-3′ (SEQ ID NO: 7), wherein a, c, g, and u are 2′-O-methyl (2′-OMe) A, C, G, or U; Af, Cf, Gf, and Uf are 2′-fluoro A, C, G, or U; and s is a phosphorothioate linkage.

[0130] In another aspect, the present invention provides methods of treating a subject suffering from a TTR-associated disease. The methods include administering to the subject a dose of about 50 mg to about 300 mg of a double stranded RNAi agent, wherein the RNAi agent comprises a sense strand complementary to an antisense strand, wherein the sense strand comprises the nucleotide sequence 5′-usgsggauUfuCfAfUfguaaccaaga-3′ (SEQ ID NO: 10) and the antisense strand comprises the nucleotide sequence 5′-usCfsuugGfuuAfcaugAfaAfucccasusc-3′ (SEQ ID NO: 7), wherein a, c, g, and u are 2′-O-methyl (2′-OMe) A, C, G, or U; Af, Cf, Gf, and Uf are 2′-fluoro A, C, G, or U; and s is a phosphorothioate linkage, thereby treating the subject suffering from a TTR-associated disease.

[0131] In yet another aspect, the present invention provides methods of prophylactically treating a subject at risk for developing a TTR-associated disease. The methods include administering to the subject a dose of about 50 mg to about 300 mg of a double stranded RNAi agent, wherein the RNAi agent comprises a sense strand complementary to an antisense strand, wherein the sense strand comprises the nucleotide sequence 5′-usgsggauUfuCfAfUfguaaccaaga-3′ (SEQ ID NO: 10) and the antisense strand comprises the nucleotide sequence 5′-usCfsuugGfuuAfcaugAfaAfucccasusc-3′ (SEQ ID NO: 7), wherein a, c, g, and u are 2′-O-methyl (2′-OMe) A, C, G, or U; Af, Cf, Gf, and Uf are 2′-fluoro A, C, G, or U; and s is a phosphorothioate linkage, thereby prophylactically treating the subject at risk for developing a TTR-associated disease.

[0132] In one aspect, the present invention provides methods of reducing, slowing, or arresting a Neuropathy Impairment Score (NIS) or a modified NIS (mNIS+7) in a subject suffering from a TTR-associated disease or at risk for developing a TTR-associated disease. The methods include administering to the subject a dose of about 50 mg to about 300 mg of a double stranded RNAi agent, wherein the RNAi agent comprises a sense strand complementary to an antisense strand, wherein the sense strand comprises the nucleotide sequence 5′-usgsggauUfuCfAfUfguaaccaaga-3′ (SEQ ID NO: 10) and the antisense strand comprises the nucleotide sequence 5′-usCfsuugGfuuAfcaugAfaAfucccasusc-3′ (SEQ ID NO: 7), wherein a, c, g, and u are 2′-O-methyl (2′-OMe) A, C, G, or U; Af, Cf, Gf, and Uf are 2′-fluoro A, C, G, or U; and s is a phosphorothioate linkage, thereby reducing, slowing, or arresting a Neuropathy Impairment Score (NIS) or a modified NIS (mNIS+7) in the subject.

[0133] In another aspect, the present invention provides methods of increasing a 6-minute walk test (6MWT) in a subject suffering from a TTR-associated disease or at risk for developing a TTR-associated disease. The methods include administering to the subject a dose of about 50 mg to about 300 mg of a double stranded RNAi agent, wherein the RNAi agent comprises a sense strand complementary to an antisense strand, wherein the sense strand comprises the nucleotide sequence 5′-usgsggauUfuCfAfUfguaaccaaga-3′ (SEQ ID NO: 10) and the antisense strand comprises the nucleotide sequence 5′-usCfsuugGfuuAfcaugAfaAfucccasusc-3′ (SEQ ID NO: 7), wherein a, c, g, and u are 2′-O-methyl (2′-OMe) A, C, G, or U; Af, Cf, Gf, and Uf are 2′-fluoro A, C, G, or U; and s is a phosphorothioate linkage, thereby increasing a 6-minute walk test (6MWT) in a subject suffering from a TTR-associated disease or at risk for developing a TTR-associated disease.

[0134] The present invention is further illustrated by the following detailed description and drawings.

### BRIEF DESCRIPTION OF THE DRAWINGS

[0135] FIG. 1 is a graph depicting the stability of the indicated RNAi agents in a twenty-four hour tristosome stability assay.

[0136] FIG. 2A is a graph depicting the stability of the indicated RNAi agents in a twenty-four hour rat cytosol stability assay and FIG. 2B is a graph depicting the stability of the indicated RNAi agents in a twenty-four hour tristosome stability assay.

[0137] FIG. 3 is a graph depicting TTR protein suppression in transgenic mice that express V30M variant of human TTR (V30M hTTR) following administration of a single subcutaneous dose of 1 mg/kg of the indicated RNAi agents.

[0138] FIG. 4 is a graph depicting TTR protein suppression in transgenic mice that express hTTR V30M following administration of a single subcutaneous dose of 2.5 mg/kg of the indicated RNAi agents.

[0139] FIG. 5 is a graph depicting TTR protein suppression in transgenic mice that express hTTR V30M following administration of a weekly 2 mg/kg dose of AD-65492 for three weeks (QWx3).

[0140] FIG. 6A is graph depicting TTR protein suppression in transgenic mice that express hTTR V30M following subcutaneous administration of a monthly 0.3 mg/kg dose of the indicated RNAi agents for four months (QMx4 @ 0.3 mg/kg). FIG. 6B is graph depicting TTR protein suppression in transgenic mice that express hTTR V30M following subcutaneous administration of a monthly 1 mg/kg dose of the indicated RNAi agents for four months (QMx4 @ 1 mg/kg). FIG. 6C is graph depicting TTR protein suppression in transgenic mice that express hTTR V30M following subcutaneous administration of a monthly 3 mg/kg dose of the indicated RNAi agents for four months (QMx4 @ 3 mg/kg).

[0141] FIG. 7 depicts the study design of AD-65492 and AD-66017 subcutaneous administration to Cynomologous monkeys.

[0142] FIG. 8A is a graph depicting TTR protein suppression in Cynomologous monkeys following administration of a single subcutaneous dose of 0.3 mg/kg of the indicated RNAi agents. FIG. 8B is a graph depicting TTR protein suppression in Cynomologous monkeys following administration of a single subcutaneous dose of 1 mg/kg of AD-65492, a single subcutaneous dose of 1 mg/kg of AD-66017, or a single subcutaneous dose of 2.5 mg/kg of AD-51547. FIG. 8C is a graph depicting TTR protein suppression in Cynomologous monkeys following administration of a single subcutaneous dose of 3 mg/kg of AD-65492, a single subcutaneous dose of 3 mg/kg of AD-66017, or a single subcutaneous dose of 5 mg/kg of AD-51547.

[0143] FIG. 9A is a graph depicting TTR protein suppression in Cynomologous monkeys following administration of a monthly subcutaneous dose of 1 mg/kg for four months (QMx4) of AD-65492, a monthly subcutaneous dose of 1 mg/kg for four months (QMx4) of AD-66017, or a daily dose of 5 mg/kg for five days, followed by a weekly 5 mg/kg dose for four weeks (QDx5, QWx4) of AD-51547. FIG. 9B is a graph depicting TTR protein suppression in Cynomologous monkeys following administration of a monthly subcutaneous dose of 3 mg/kg for four months (QMx4) of the indicated RNAi agents.

[0144] FIG. 10A is a graph depicting the maintenance of TTR suppression by subcutaneous administration of a monthly 1 mg/kg dose of AD-65492 for four months (QMx4; solid line) compared to TTR suppression after a single 1 mg/kg subcutaneous dose of AD-65492 (dashed line) in Cynomologous monkeys.

[0145] FIG. 10B is a graph depicting an additive effect of subcutaneous administration of a monthly 1 mg/kg dose of AD-66017 for four months (QMx4; solid line) on TTR protein suppression compared to a single subcutaneous dose of 1 mg/kg of AD-66017 (dashed line) in Cynomologous monkeys.

[0146] FIG. 11 is a graph depicting sustained scrum TTR suppression in Cynomologous monkeys following monthly subcutaneous administration of a 1 mg/kg dose of AD-65492 for four months (QMx4), or monthly subcutaneous administration of a 3 mg/kg dose of AD-65492 for four months (QMx4) as compared to a single subcutaneously administered 1 mg/kg dose of AD-65492 or a single subcutaneously administered 0.3 mg/kg dose of AD-65492.

[0147] FIG. 12 depicts the study design of AD-65492 subcutaneous administration to Cynomologous monkeys.

[0148] FIG. 13 is a graph depicting robust serum TTR suppression in Cynomologous monkeys following monthly subcutaneous administration of a 0.3 mg/kg dose of AD-65492 for six months (QMx6) or monthly subcutaneous administration of a 0.6 mg/kg dose of AD-65492 for six months (QMx6) or administration of a single 1 mg/kg initial dose of AD-65492 (QMx1) followed by a monthly 0.3 mg/kg dose of AD-65492 beginning at day 28 post-initial dose for five months (QMx5).

### DETAILED DESCRIPTION OF THE INVENTION

[0149] The present invention provides RNAi agents, e.g., double stranded RNAi agents, and compositions targeting the Transthyretin (TTR) gene. The present invention also provides methods of inhibiting expression of TTR and methods of treating or preventing a TTR-associated disease in a subject using the RNAi agents, e.g., double stranded RNAi agents, of the invention. The present invention is based, at least in part, on the discovery that RNAi agents in which substantially all of the nucleotides on the sense strand and substantially all of the nucleotides of the antisense strand are modified nucleotides and that comprise no more than 8 2′-fluoro modifications (e.g., no more than 7 2′-fluoro modifications, no more than 6 2′-fluoro modifications, no more than 5 2′-fluoro modifications, no more than 4 2′-fluoro modifications, no more than 5 2′-fluoro modifications, no more than 4 2′-fluoro modifications, no more than 3 2′-fluoro modifications, or no more than 2 2′-fluoro modifications) on the sense strand, no more than 6 2′-fluoro modifications (e.g., no more than 5 2′-fluoro modifications, no more than 4 2′-fluoro modifications, no more than 3 2′-fluoro modifications, or no more than 2 2′-fluoro modifications) on the antisense strand, two phosphorothioate linkages at the 5′-end of the sense strand, two phosphorothioate linkages at the 5′-end of the antisense strand, and a ligand, e.g., a GalNAc₃ ligand, are shown herein to be effective in selectively silencing the activity of the TTR gene. These agents show surprisingly enhanced TTR gene silencing activity. Without intending to be limited by theory, it is believed that a combination or sub-combination of the foregoing modifications and the specific target sites in these RNAi agents confer to the RNAi agents of the invention improved efficacy, stability, potency, and durability.

[0150] The following detailed description discloses how to make and use compositions containing iRNAs to selectively inhibit the expression of a TTR gene, as well as compositions, uses, and methods for treating subjects having diseases and disorders that would benefit from inhibition and/or reduction of the expression of a TTR gene.

### I. Definitions

[0151] In order that the present invention may be more readily understood, certain terms are first defined. In addition, it should be noted that whenever a value or range of values of a parameter are recited, it is intended that values and ranges intermediate to the recited values are also intended to be part of this invention.

[0152] The articles “a” and “an” are used herein to refer to one or to more than one (i.e., to at least one) of the grammatical object of the article. By way of example, “an element” means one element or more than one element, e.g., a plurality of elements.

[0153] The term “including” is used herein to mean, and is used interchangeably with, the phrase “including but not limited to”.

[0154] The term “or” is used herein to mean, and is used interchangeably with, the term “and/or,” unless context clearly indicates otherwise.

[0155] The term “about” is used herein to mean within the typical ranges of tolerances in the art. For example, “about” can be understood as within about 2 standard deviations from the mean. In certain embodiments, about means+10%. In certain embodiments, about means+5%. When about is present before a series of numbers or a range, it is understood that “about” can modify each of the numbers in the series or range.

[0156] As used herein, a “transthyretin” (“TTR”) refers to the well known gene and protein. TTR is also known as prealbumin, HsT2651, PALB, and TBPA. TTR functions as a transporter of retinol-binding protein (RBP), thyroxine (T4) and retinol, and it also acts as a protease. The liver secretes TTR into the blood, and the choroid plexus secretes TTR into the cerebrospinal fluid. TTR is also expressed in the pancreas and the retinal pigment epithelium. The greatest clinical relevance of TTR is that both normal and mutant TTR protein can form amyloid fibrils that aggregate into extracellular deposits, causing amyloidosis. Sec, e.g., Saraiva M. J. M. (2002) Expert Reviews in Molecular Medicine, 4 (12): 1-11 for a review. The molecular cloning and nucleotide sequence of rat transthyretin, as well as the distribution of mRNA expression, was described by Dickson, P. W. et al. (1985) J. Biol. Chem. 260 (13) 8214-8219. The X-ray crystal structure of human TTR was described in Blake, C. C. et al. (1974) J Mol Biol 88, 1-12. The sequence of a human TTR mRNA transcript can be found at National Center for Biotechnology Information (NCBI) RefSeq accession number NM_000371 (e.g., SEQ ID NOs: 1 and 5). The sequence of mouse TTR mRNA can be found at RefSeq accession number NM_013697.2, and the sequence of rat TTR mRNA can be found at RefSeq accession number NM_012681.1. Additional examples of TTR mRNA sequences are readily available using publicly available databases, e.g., GenBank, UniProt, and OMIM.

[0157] As used herein, “target sequence” refers to a contiguous portion of the nucleotide sequence of an mRNA molecule formed during the transcription of a TTR gene, including mRNA that is a product of RNA processing of a primary transcription product. In one embodiment, the target portion of the sequence will be at least long enough to serve as a substrate for iRNA-directed cleavage at or near that portion of the nucleotide sequence of an mRNA molecule formed during the transcription of a TTR gene. In one embodiment, the target sequence is within the protein coding region of the TTR gene. In another embodiment, the target sequence is within the 3′ UTR of the TTR gene.

[0158] The target sequence may be from about 9-36 nucleotides in length, e.g., about 15-30 nucleotides in length. For example, the target sequence can be from about 15-30 nucleotides, 15-29, 15-28, 15-27, 15-26, 15-25, 15-24, 15-23, 15-22, 15-21, 15-20, 15-19, 15-18, 15-17, 18-30, 18-29, 18-28, 18-27, 18-26, 18-25, 18-24, 18-23, 18-22, 18-21, 18-20, 19-30, 19-29, 19-28, 19-27, 19-26, 19-25, 19-24, 19-23, 19-22, 19-21, 19-20, 20-30, 20-29, 20-28, 20-27, 20-26, 20-25, 20-24, 20-23, 20-22, 20-21, 21-30, 21-29, 21-28, 21-27, 21-26, 21-25, 21-24, 21-23, or 21-22 nucleotides in length. In some embodiments, the target sequence is about 19 to about 30 nucleotides in length. In other embodiments, the target sequence is about 19 to about 25 nucleotides in length. In still other embodiments, the target sequence is about 19 to about 23 nucleotides in length. In some embodiments, the target sequence is about 21 to about 23 nucleotides in length. Ranges and lengths intermediate to the above recited ranges and lengths are also contemplated to be part of the invention.

[0159] In some embodiments of the invention, the target sequence of a TTR gene comprises nucleotides 615-637 of SEQ ID NO: 1 or nucleotides 505-527 of SEQ ID NO: 5 (i.e., 5′-GATGGGATTTCATGTAACCAAGA-3′; SEQ ID NO:4).

[0160] As used herein, the term “strand comprising a sequence” refers to an oligonucleotide comprising a chain of nucleotides that is described by the sequence referred to using the standard nucleotide nomenclature.

[0161] “G,” “C,” “A,” “T” and “U” each generally stand for a nucleotide that contains guanine, cytosine, adenine, thymidine and uracil as a base, respectively. However, it will be understood that the term “ribonucleotide” or “nucleotide” can also refer to a modified nucleotide, as further detailed below, or a surrogate replacement moiety (see, e.g., Table 2). The skilled person is well aware that guanine, cytosine, adenine, and uracil can be replaced by other moieties without substantially altering the base pairing properties of an oligonucleotide comprising a nucleotide bearing such replacement moiety. For example, without limitation, a nucleotide comprising inosine as its base can base pair with nucleotides containing adenine, cytosine, or uracil. Hence, nucleotides containing uracil, guanine, or adenine can be replaced in the nucleotide sequences of dsRNA featured in the invention by a nucleotide containing, for example, inosine. In another example, adenine and cytosine anywhere in the oligonucleotide can be replaced with guanine and uracil, respectively to form G-U Wobble base pairing with the target mRNA. Sequences containing such replacement moieties are suitable for the compositions and methods featured in the invention.

[0162] The terms “IRNA,” “RNAi agent,” “iRNA agent,”, “RNA interference agent” as used interchangeably herein, refer to an agent that contains RNA as that term is defined herein, and which mediates the targeted cleavage of an RNA transcript via an RNA-induced silencing complex (RISC) pathway. iRNA directs the sequence-specific degradation of mRNA through a process known as RNA interference (RNAi). The iRNA modulates, e.g., inhibits, the expression of a TTR gene in a cell, e.g., a cell within a subject, such as a mammalian subject.

[0163] In one embodiment, an RNAi agent of the invention includes a single stranded RNA that interacts with a target RNA sequence, e.g., a TTR target mRNA sequence, to direct the cleavage of the target RNA. Without wishing to be bound by theory it is believed that long double stranded RNA introduced into cells is broken down into double stranded short interfering RNAs (siRNAs) comprising a sense strand and an antisense strand by a Type III endonuclease known as Dicer (Sharp et al. (2001) Genes Dev. 15:485). Dicer, a ribonuclease-III-like enzyme, processes these dsRNA into 19-23 base pair short interfering RNAs with characteristic two base 3′ overhangs (Bernstein, et al., (2001) Nature 409:363). These siRNAs are then incorporated into an RNA-induced silencing complex (RISC) where one or more helicases unwind the siRNA duplex, enabling the complementary antisense strand to guide target recognition (Nykanen, et al., (2001) Cell 107:309). Upon binding to the appropriate target mRNA, one or more endonucleases within the RISC cleave the target to induce silencing (Elbashir, et al., (2001) Genes Dev. 15:188). Thus, in one aspect the invention relates to a single stranded siRNA (ssRNA) (the antisense strand of an siRNA duplex) generated within a cell and which promotes the formation of a RISC complex to effect silencing of the target gene, i.e., a TTR gene. Accordingly, the term “siRNA” is also used herein to refer to an RNAi as described above.

[0164] In another embodiment, the RNAi agent may be a single-stranded RNA that is introduced into a cell or organism to inhibit a target mRNA. Single-stranded RNAi agents bind to the RISC endonuclease, Argonaute 2, which then cleaves the target mRNA. The single-stranded siRNAs are generally 15-30 nucleotides and are chemically modified. The design and testing of single-stranded siRNAs are described in U.S. Pat. No. 8,101,348 and in Lima et al., (2012) Cell 150:883-894, the entire contents of each of which are hereby incorporated herein by reference. Any of the antisense nucleotide sequences described herein may be used as a single-stranded RNA as described herein or as chemically modified by the methods described in Lima et al., (2012) Cell 150:883-894.

[0165] In another embodiment, an “iRNA” for use in the compositions, uses, and methods of the invention is a double stranded RNA and is referred to herein as a “double stranded RNAi agent,” “double stranded RNA (dsRNA) molecule,” “dsRNA agent,” or “dsRNA”. The term “dsRNA” refers to a complex of ribonucleic acid molecules, having a duplex structure comprising two anti-parallel and substantially complementary nucleic acid strands, referred to as having “sense” and “antisense” orientations with respect to a target RNA, i.e., a TTR gene. In some embodiments of the invention, a double stranded RNA (dsRNA) triggers the degradation of a target RNA, e.g., an mRNA, through a post-transcriptional gene-silencing mechanism referred to herein as RNA interference or RNAi.

[0166] In general, the majority of nucleotides of each strand of a dsRNA molecule are ribonucleotides, but as described in detail herein, each or both strands can also include one or more non-ribonucleotides, e.g., a deoxyribonucleotide and/or a modified nucleotide. In addition, as used in this specification, an “RNAi agent” may include ribonucleotides with chemical modifications; an RNAi agent may include substantial modifications at multiple nucleotides.

[0167] As used herein, the term “modified nucleotide” refers to a nucleotide having, independently, a modified sugar moiety, a modified internucleotide linkage, and/or a modified nucleobase. Thus, the term modified nucleotide encompasses substitutions, additions or removal of, e.g., a functional group or atom, to internucleoside linkages, sugar moieties, or nucleobases. The modifications suitable for use in the agents of the invention include all types of modifications disclosed herein or known in the art. Any such modifications, as used in a siRNA type molecule, are encompassed by “RNAi agent” for the purposes of this specification and claims.

[0168] The duplex region may be of any length that permits specific degradation of a desired target RNA through a RISC pathway, and may range from about 9 to 36 base pairs in length, e.g., about 15-30 base pairs in length, for example, about 9, 10, 11, 12, 13, 14, 15, 16, 17, 18, 19, 20, 21, 22, 23, 24, 25, 26, 27, 28, 29, 30, 31, 32, 33, 34, 35, or 36 base pairs in length, such as about 15-30, 15-29, 15-28, 15-27, 15-26, 15-25, 15-24, 15-23, 15-22, 15-21, 15-20, 15-19, 15-18, 15-17, 18-30, 18-29, 18-28, 18-27, 18-26, 18-25, 18-24, 18-23, 18-22, 18-21, 18-20, 19-30, 19-29, 19-28, 19-27, 19-26, 19-25, 19-24, 19-23, 19-22, 19-21, 19-20, 20-30, 20-29, 20-28, 20-27, 20-26, 20-25, 20-24, 20-23, 20-22, 20-21, 21-30, 21-29, 21-28, 21-27, 21-26, 21-25, 21-24, 21-23, or 21-22 base pairs in length. Ranges and lengths intermediate to the above recited ranges and lengths are also contemplated to be part of the invention.

[0169] The two strands forming the duplex structure may be different portions of one larger RNA molecule, or they may be separate RNA molecules. Where the two strands are part of one larger molecule, and therefore are connected by an uninterrupted chain of nucleotides between the 3′-end of one strand and the 5′-end of the respective other strand forming the duplex structure, the connecting RNA chain is referred to as a “hairpin loop.” A hairpin loop can comprise at least one unpaired nucleotide. In some embodiments, the hairpin loop can comprise at least 2, at least 3, at least 4, at least 5, at least 6, at least 7, at least 8, at least 9, at least 10, at least 20, at least 23 or more unpaired nucleotides. In some embodiments, the hairpin loop can be 10 or fewer nucleotides. In some embodiments, the hairpin loop can be 8 or fewer unpaired nucleotides. In some embodiments, the hairpin loop can be 4-10 unpaired nucleotides. In some embodiments, the hairpin loop can be 4-8 nucleotides.

[0170] Where the two substantially complementary strands of a dsRNA are comprised by separate RNA molecules, those molecules need not, but can be covalently connected. Where the two strands are connected covalently by means other than an uninterrupted chain of nucleotides between the 3′-end of one strand and the 5′-end of the respective other strand forming the duplex structure, the connecting structure is referred to as a “linker.” The RNA strands may have the same or a different number of nucleotides. The maximum number of base pairs is the number of nucleotides in the shortest strand of the dsRNA minus any overhangs that are present in the duplex. In addition to the duplex structure, an RNAi may comprise one or more nucleotide overhangs.

[0171] In one embodiment, an RNAi agent of the invention is a dsRNA, each strand of which is 24-30 nucleotides in length, that interacts with a target RNA sequence, e.g., a TTR target mRNA sequence, to direct the cleavage of the target RNA. Without wishing to be bound by theory, long double stranded RNA introduced into cells is broken down into siRNA by a Type III endonuclease known as Dicer (Sharp et al. (2001) Genes Dev. 15:485). Dicer, a ribonuclease-III-like enzyme, processes the dsRNA into 19-23 base pair short interfering RNAs with characteristic two base 3′ overhangs (Bernstein, et al., (2001) Nature 409:363). The siRNAs are then incorporated into an RNA-induced silencing complex (RISC) where one or more helicases unwind the siRNA duplex, enabling the complementary antisense strand to guide target recognition (Nykanen, et al., (2001) Cell 107:309). Upon binding to the appropriate target mRNA, one or more endonucleases within the RISC cleave the target to induce silencing (Elbashir, et al., (2001) Genes Dev. 15:188). In one embodiment of the RNAi agent, at least one strand comprises a 3′ overhang of at least 1 nucleotide. In another embodiment, at least one strand comprises a 3′ overhang of at least 2 nucleotides, e.g., 2, 3, 4, 5, 6, 7, 9, 10, 11, 12, 13, 14, or 15 nucleotides. In other embodiments, at least one strand of the RNAi agent comprises a 5′ overhang of at least 1 nucleotide. In certain embodiments, at least one strand comprises a 5′ overhang of at least 2 nucleotides, e.g., 2, 3, 4, 5, 6, 7, 9, 10, 11, 12, 13, 14, or 15 nucleotides. In still other embodiments, both the 3′ and the 5′ end of one strand of the RNAi agent comprise an overhang of at least 1 nucleotide.

[0172] In one embodiment, an RNAi agent of the invention is a dsRNA agent, each strand of which comprises 19-23 nucleotides that interacts with aTTR RNA sequence to direct the cleavage of the target RNA. Without wishing to be bound by theory, long double stranded RNA introduced into cells is broken down into siRNA by a Type III endonuclease known as Dicer (Sharp et al. (2001) Genes Dev. 15:485). Dicer, a ribonuclease-III-like enzyme, processes the dsRNA into 19-23 base pair short interfering RNAs with characteristic two base 3′ overhangs (Bernstein, et al., (2001) Nature 409:363). The siRNAs are then incorporated into an RNA-induced silencing complex (RISC) where one or more helicases unwind the siRNA duplex, enabling the complementary antisense strand to guide target recognition (Nykanen, et al., (2001) Cell 107:309). Upon binding to the appropriate target mRNA, one or more endonucleases within the RISC cleave the target to induce silencing (Elbashir, et al., (2001) Genes Dev. 15:188). In one embodiment, an RNAi agent of the invention is a dsRNA of 24-30 nucleotides that interacts with a TTR RNA sequence to direct the cleavage of the target RNA.

[0173] As used herein, the term “nucleotide overhang” refers to at least one unpaired nucleotide that protrudes from the duplex structure of an iRNA, e.g., a dsRNA. For example, when a 3′-end of one strand of a dsRNA extends beyond the 5′-end of the other strand, or vice versa, there is a nucleotide overhang. A dsRNA can comprise an overhang of at least one nucleotide; alternatively the overhang can comprise at least two nucleotides, at least three nucleotides, at least four nucleotides, at least five nucleotides or more. A nucleotide overhang can comprise or consist of a nucleotide/nucleoside analog, including a deoxynucleotide/nucleoside. The overhang(s) can be on the sense strand, the antisense strand or any combination thereof. Furthermore, the nucleotide(s) of an overhang can be present on the 5′-end, 3′-end or both ends of either an antisense or sense strand of a dsRNA. In one embodiment of the dsRNA, at least one strand comprises a 3′ overhang of at least 1 nucleotide. In another embodiment, at least one strand comprises a 3′ overhang of at least 2 nucleotides, e.g., 2, 3, 4, 5, 6, 7, 9, 10, 11, 12, 13, 14, or 15 nucleotides. In other embodiments, at least one strand of the RNAi agent comprises a 5′ overhang of at least 1 nucleotide. In certain embodiments, at least one strand comprises a 5′ overhang of at least 2 nucleotides, e.g., 2, 3, 4, 5, 6, 7, 9, 10, 11, 12, 13, 14, or 15 nucleotides. In still other embodiments, both the 3′ and the 5′ end of one strand of the RNAi agent comprise an overhang of at least 1 nucleotide.

[0174] In one embodiment, the antisense strand of a dsRNA has a 1-10 nucleotide, e.g., 0-3, 1-3, 2-4, 2-5, 4-10, 5-10, e.g., a 1, 2, 3, 4, 5, 6, 7, 8, 9, or 10 nucleotide, overhang at the 3′-end and/or the 5′-end. In one embodiment, the sense strand of a dsRNA has a 1-10 nucleotide, e.g., a 1, 2, 3, 4, 5, 6, 7, 8, 9, or 10 nucleotide, overhang at the 3′-end and/or the 5′-end. In another embodiment, one or more of the nucleotides in the overhang is replaced with a nucleoside thiophosphate.

[0175] In certain embodiments, the overhang on the sense strand or the antisense strand, or both, can include extended lengths longer than 10 nucleotides, e.g., 1-30 nucleotides, 2-30 nucleotides, 10-30 nucleotides, or 10-15 nucleotides in length. In certain embodiments, an extended overhang is on the sense strand of the duplex. In certain embodiments, an extended overhang is present on the 3′end of the sense strand of the duplex. In certain embodiments, an extended overhang is present on the 5′end of the sense strand of the duplex. In certain embodiments, an extended overhang is on the antisense strand of the duplex. In certain embodiments, an extended overhang is present on the 3′end of the antisense strand of the duplex. In certain embodiments, an extended overhang is present on the 5′end of the antisense strand of the duplex. In certain embodiments, one or more of the nucleotides in the overhang is replaced with a nucleoside thiophosphate. In certain embodiments, the overhang includes a self-complementary portion such that the overhang is capable of forming a hairpin structure that is stable under physiological conditions.

[0176] “Blunt” or “blunt end” means that there are no unpaired nucleotides at that end of the double stranded RNAi agent, i.e., no nucleotide overhang. A “blunt ended” RNAi agent is a dsRNA that is double stranded over its entire length, i.e., no nucleotide overhang at either end of the molecule. The RNAi agents of the invention include RNAi agents with nucleotide overhangs at one end (i.e., agents with one overhang and one blunt end) or with nucleotide overhangs at both ends.

[0177] The term “antisense strand” or “guide strand” refers to the strand of an iRNA, e.g., a dsRNA, which includes a region that is substantially complementary to a target sequence, e.g., a TTR mRNA. As used herein, the term “region of complementarity” refers to the region on the antisense strand that is substantially complementary to a sequence, for example a target sequence, e.g., a TTR nucleotide sequence, as defined herein. Where the region of complementarity is not fully complementary to the target sequence, the mismatches can be in the internal or terminal regions of the molecule. Generally, the most tolerated mismatches are in the terminal regions, e.g., within 5, 4, 3, 2, or 1 nucleotides of the 5′- and/or 3′-terminus of the iRNA. In one embodiment, a double stranded RNAi agent of the invention includes a nucleotide mismatch in the antisense strand. In another embodiment, a double stranded RNAi agent of the invention includes a nucleotide mismatch in the sense strand. In one embodiment, the nucleotide mismatch is, for example, within 5, 4, 3, 2, or 1 nucleotides from the 3′-terminus of the iRNA. In another embodiment, the nucleotide mismatch is, for example, in the 3′-terminal nucleotide of the iRNA.

[0178] The term “sense strand,” or “passenger strand” as used herein, refers to the strand of an iRNA that includes a region that is substantially complementary to a region of the antisense strand as that term is defined herein.

[0179] As used herein, the term “cleavage region” refers to a region that is located immediately adjacent to the cleavage site. The cleavage site is the site on the target at which cleavage occurs. In some embodiments, the cleavage region comprises three bases on either end of, and immediately adjacent to, the cleavage site. In some embodiments, the cleavage region comprises two bases on either end of, and immediately adjacent to, the cleavage site. In some embodiments, the cleavage site specifically occurs at the site bound by nucleotides 10 and 11 of the antisense strand, and the cleavage region comprises nucleotides 11, 12 and 13.

[0180] As used herein, and unless otherwise indicated, the term “complementary,” when used to describe a first nucleotide sequence in relation to a second nucleotide sequence, refers to the ability of an oligonucleotide or polynucleotide comprising the first nucleotide sequence to hybridize and form a duplex structure under certain conditions with an oligonucleotide or polynucleotide comprising the second nucleotide sequence, as will be understood by the skilled person. Such conditions can, for example, be stringent conditions, where stringent conditions can include: 400 mM NaCl, 40 mM PIPES pH 6.4, 1 mM EDTA, 50° C. or 70° C. for 12-16 hours followed by washing (see, e.g., “Molecular Cloning: A Laboratory Manual, Sambrook, et al. (1989) Cold Spring Harbor Laboratory Press). Other conditions, such as physiologically relevant conditions as can be encountered inside an organism, can apply. The skilled person will be able to determine the set of conditions most appropriate for a test of complementarity of two sequences in accordance with the ultimate application of the hybridized nucleotides.

[0181] Complementary sequences within an iRNA, e.g., within a dsRNA as described herein, include base-pairing of the oligonucleotide or polynucleotide comprising a first nucleotide sequence to an oligonucleotide or polynucleotide comprising a second nucleotide sequence over the entire length of one or both nucleotide sequences. Such sequences can be referred to as “fully complementary” with respect to each other herein. However, where a first sequence is referred to as “substantially complementary” with respect to a second sequence herein, the two sequences can be fully complementary, or they can form one or more, but generally not more than 5, 4, 3 or 2 mismatched base pairs upon hybridization for a duplex up to 30 base pairs, while retaining the ability to hybridize under the conditions most relevant to their ultimate application, e.g., inhibition of gene expression via a RISC pathway. However, where two oligonucleotides are designed to form, upon hybridization, one or more single stranded overhangs, such overhangs shall not be regarded as mismatches with regard to the determination of complementarity. For example, a dsRNA comprising one oligonucleotide 21 nucleotides in length and another oligonucleotide 23 nucleotides in length, wherein the longer oligonucleotide comprises a sequence of 21 nucleotides that is fully complementary to the shorter oligonucleotide, can yet be referred to as “fully complementary” for the purposes described herein.

[0182] “Complementary” sequences, as used herein, can also include, or be formed entirely from, non-Watson-Crick base pairs and/or base pairs formed from non-natural and modified nucleotides, in so far as the above requirements with respect to their ability to hybridize are fulfilled. Such non-Watson-Crick base pairs include, but are not limited to, G: U Wobble or Hoogstein base pairing.

[0183] The terms “complementary,” “fully complementary” and “substantially complementary” herein can be used with respect to the base matching between the sense strand and the antisense strand of a dsRNA, or between the antisense strand of an iRNA agent and a target sequence, as will be understood from the context of their use.

[0184] As used herein, a polynucleotide that is “substantially complementary to at least part of” a messenger RNA (mRNA) refers to a polynucleotide that is substantially complementary to a contiguous portion of the mRNA of interest (e.g., an mRNA encoding a TTR gene). For example, a polynucleotide is complementary to at least a part of a TTR mRNA if the sequence is substantially complementary to a non-interrupted portion of an mRNA encoding a TTR gene.

[0185] Accordingly, in some embodiments, the antisense polynucleotides disclosed herein are fully complementary to the target TTR sequence. In other embodiments, the antisense polynucleotides disclosed herein are fully complementary to SEQ ID NO:2 (5′-UGGGAUUUCAUGUAACCAAGA-3′). In one embodiment, the antisense polynucleotide sequence is 5′-UCUUGGUUACAUGAAAUCCCAUC-3′ (SEQ ID NO: 3).

[0186] In other embodiments, the antisense polynucleotides disclosed herein are substantially complementary to the target TTR sequence and comprise a contiguous nucleotide sequence which is at least about 80% complementary over its entire length to the equivalent region of the nucleotide sequence of any one of SEQ ID NO:2 (5′-UGGGAUUUCAUGUAACCAAGA-3′), or a fragment of any one of SEQ ID NOs: 1, 2, and 5, such as about 85%, about 86%, about 87%, about 88%, about 89%, about 90%, about % 91%, about 92%, about 93%, about 94%, about 95%, about 96%, about 97%, about 98%, or about 99% complementary.

[0187] In one embodiment, an RNAi agent of the invention includes a sense strand that is substantially complementary to an antisense polynucleotide which, in turn, is complementary to a target TTR sequence, and wherein the sense strand polynucleotide comprises a contiguous nucleotide sequence which is at least about 80% complementary over its entire length to the equivalent region of the nucleotide sequence of any one of the sequences in Tables 1, 3, 5, 6, and 7, such as about 85%, about 86%, about 87%, about 88%, about 89%, about 90%, about % 91%, about 92%, about 93%, about 94%, about 95%, about 96%, about 97%, about 98%, or about 99% complementary.

[0188] In another embodiment, an RNAi agent of the invention includes an antisense strand that is substantially complementary to the target TTR sequence and comprise a contiguous nucleotide sequence which is at least about 80% complementary over its entire length to the equivalent region of the nucleotide sequence of any one of the sequences in Table 1 and 3, such as about 85%, about 86%, about 87%, about 88%, about 89%, about 90%, about % 91%, about 92%, about 93%, about 94%, about 95%, about 96%, about 97%, about 98%, or about 99% complementary.

[0189] In some embodiments, the majority of nucleotides of each strand are ribonucleotides, but as described in detail herein, each or both strands can also include one or more non-ribonucleotides, e.g., a deoxyribonucleotide and/or a modified nucleotide. In addition, an “iRNA” may include ribonucleotides with chemical modifications. Such modifications may include all types of modifications disclosed herein or known in the art. Any such modifications, as used in an iRNA molecule, are encompassed by “iRNA” for the purposes of this specification and claims.

[0190] In one aspect of the invention, an agent for use in the methods and compositions of the invention is a single-stranded antisense nucleic acid molecule that inhibits a target mRNA via an antisense inhibition mechanism. The single-stranded antisense RNA molecule is complementary to a sequence within the target mRNA. The single-stranded antisense oligonucleotides can inhibit translation in a stoichiometric manner by base pairing to the mRNA and physically obstructing the translation machinery, see Dias, N. et al., (2002) Mol Cancer Ther 1:347-355. The single-stranded antisense RNA molecule may be about 15 to about 30 nucleotides in length and have a sequence that is complementary to a target sequence. For example, the single-stranded antisense RNA molecule may comprise a sequence that is at least about 15, 16, 17, 18, 19, 20, or more contiguous nucleotides from any one of the antisense sequences described herein.

[0191] A “TTR-associated disease,” as used herein, is intended to include any disease associated with the TTR gene or protein. Such a disease may be caused, for example, by excess production of the TTR protein, by TTR gene mutations, by abnormal cleavage of the TTR protein, by abnormal interactions between TTR and other proteins or other endogenous or exogenous substances. A “TTR-associated disease” includes any type of TTR amyloidosis (ATTR) wherein TTR plays a role in the formation of abnormal extracellular aggregates or amyloid deposits. TTR-associated diseases include senile systemic amyloidosis (SSA), systemic familial amyloidosis, familial amyloidotic polyneuropathy (FAP), familial amyloidotic cardiomyopathy (FAC), leptomeningeal/Central Nervous System (CNS) amyloidosis, amyloidotic vitreous opacities, carpal tunnel syndrome, and hyperthyroxinemia. Symptoms of TTR amyloidosis include sensory neuropathy (e.g., paresthesia, hypesthesia in distal limbs), autonomic neuropathy (e.g., gastrointestinal dysfunction, such as gastric ulcer, or orthostatic hypotension), motor neuropathy, seizures, dementia, myelopathy, polyneuropathy, carpal tunnel syndrome, autonomic insufficiency, cardiomyopathy, vitreous opacities, renal insufficiency, nephropathy, substantially reduced mBMI (modified Body Mass Index), cranial nerve dysfunction, and corneal lattice dystrophy.

### II. iRNAs of the Invention

[0192] The present invention provides iRNAs which selectively inhibit the expression of one or more TTR genes. In one embodiment, the iRNA agent includes double stranded ribonucleic acid (dsRNA) molecules for inhibiting the expression of a TTR gene in a cell, such as a cell within a subject, e.g., a mammal, such as a human having a TTR-associated disease. The dsRNA includes an antisense strand having a region of complementarity which is complementary to at least a part of an mRNA formed in the expression of a TTR gene. The region of complementarity is about 30 nucleotides or less in length (e.g., about 30, 29, 28, 27, 26, 25, 24, 23, 22, 21, 20, 19, or 18 nucleotides or less in length). Upon contact with a cell expressing the TTR gene, the iRNA selectively inhibits the expression of the TTR gene (e.g., a human, a primate, a non-primate, or a bird TTR gene) by at least about 10% as assayed by, for example, a PCR or branched DNA (bDNA)-based method, or by a protein-based method, such as by immunofluorescence analysis, using, for example, Western Blotting or flowcytometric techniques.

[0193] A dsRNA includes two RNA strands that are complementary and hybridize to form a duplex structure under conditions in which the dsRNA will be used. One strand of a dsRNA (the antisense strand) includes a region of complementarity that is substantially complementary, and generally fully complementary, to a target sequence. The target sequence can be derived from the sequence of an mRNA formed during the expression of a TTR gene. The other strand (the sense strand) includes a region that is complementary to the antisense strand, such that the two strands hybridize and form a duplex structure when combined under suitable conditions. As described elsewhere herein and as known in the art, the complementary sequences of a dsRNA can also be contained as self-complementary regions of a single nucleic acid molecule, as opposed to being on separate oligonucleotides.

[0194] Generally, the duplex structure is between 15 and 30 base pairs in length, e.g., between, 15-29, 15-28, 15-27, 15-26, 15-25, 15-24, 15-23, 15-22, 15-21, 15-20, 15-19, 15-18, 15-17, 18-30, 18-29, 18-28, 18-27, 18-26, 18-25, 18-24, 18-23, 18-22, 18-21, 18-20, 19-30, 19-29, 19-28, 19-27, 19-26, 19-25, 19-24, 19-23, 19-22, 19-21, 19-20, 20-30, 20-29, 20-28, 20-27, 20-26, 20-25, 20-24, 20-23, 20-22, 20-21, 21-30, 21-29, 21-28, 21-27, 21-26, 21-25, 21-24, 21-23, or 21-22 base pairs in length. Ranges and lengths intermediate to the above recited ranges and lengths are also contemplated to be part of the invention.

[0195] Similarly, the region of complementarity to the target sequence is between 15 and 30 nucleotides in length, e.g., between 15-29, 15-28, 15-27, 15-26, 15-25, 15-24, 15-23, 15-22, 15-21, 15-20, 15-19, 15-18, 15-17, 18-30, 18-29, 18-28, 18-27, 18-26, 18-25, 18-24, 18-23, 18-22, 18-21, 18-20, 19-30, 19-29, 19-28, 19-27, 19-26, 19-25, 19-24, 19-23, 19-22, 19-21, 19-20, 20-30, 20-29, 20-28, 20-27, 20-26, 20-25, 20-24, 20-23, 20-22, 20-21, 21-30, 21-29, 21-28, 21-27, 21-26, 21-25, 21-24, 21-23, or 21-22 nucleotides in length. Ranges and lengths intermediate to the above recited ranges and lengths are also contemplated to be part of the invention.

[0196] In some embodiments, the dsRNA is about 15 to about 20 nucleotides in length, or about 25 to about 30 nucleotides in length. In general, the dsRNA is long enough to serve as a substrate for the Dicer enzyme. For example, it is well-known in the art that dsRNAs longer than about 21-23 nucleotides in length may serve as substrates for Dicer. As the ordinarily skilled person will also recognize, the region of an RNA targeted for cleavage will most often be part of a larger RNA molecule, often an mRNA molecule. Where relevant, a “part” of an mRNA target is a contiguous sequence of an mRNA target of sufficient length to allow it to be a substrate for RNAi-directed cleavage (i.e., cleavage through a RISC pathway).

[0197] One of skill in the art will also recognize that the duplex region is a primary functional portion of a dsRNA, e.g., a duplex region of about 9 to 36 base pairs, e.g., about 10-36, 11-36, 12-36, 13-36, 14-36, 15-36, 9-35, 10-35, 11-35, 12-35, 13-35, 14-35, 15-35, 9-34, 10-34, 11-34, 12-34, 13-34, 14-34, 15-34, 9-33, 10-33, 11-33, 12-33, 13-33, 14-33, 15-33, 9-32, 10-32, 11-32, 12-32, 13-32, 14-32, 15-32, 9-31, 10-31, 11-31, 12-31, 13-32, 14-31, 15-31, 15-30, 15-29, 15-28, 15-27, 15-26, 15-25, 15-24, 15-23, 15-22, 15-21, 15-20, 15-19, 15-18, 15-17, 18-30, 18-29, 18-28, 18-27, 18-26, 18-25, 18-24, 18-23, 18-22, 18-21, 18-20, 19-30, 19-29, 19-28, 19-27, 19-26, 19-25, 19-24, 19-23, 19-22, 19-21, 19-20, 20-30, 20-29, 20-28, 20-27, 20-26, 20-25, 20-24, 20-23, 20-22, 20-21, 21-30, 21-29, 21-28, 21-27, 21-26, 21-25, 21-24, 21-23, or 21-22 base pairs. Thus, in one embodiment, to the extent that it becomes processed to a functional duplex, of e.g., 15-30 base pairs, that targets a desired RNA for cleavage, an RNA molecule or complex of RNA molecules having a duplex region greater than 30 base pairs is a dsRNA. Thus, an ordinarily skilled artisan will recognize that in one embodiment, a miRNA is a dsRNA. In another embodiment, a dsRNA is not a naturally occurring miRNA. In another embodiment, an iRNA agent useful to target TTR gene expression is not generated in the target cell by cleavage of a larger dsRNA.

[0198] A dsRNA as described herein can further include one or more single-stranded nucleotide overhangs e.g., 1, 2, 3, or 4 nucleotides. dsRNAs having at least one nucleotide overhang can have unexpectedly superior inhibitory properties relative to their blunt-ended counterparts. A nucleotide overhang can comprise or consist of a nucleotide/nucleoside analog, including a deoxynucleotide/nucleoside. The overhang(s) can be on the sense strand, the antisense strand or any combination thereof. Furthermore, the nucleotide(s) of an overhang can be present on the 5′-end, 3′-end or both ends of either an antisense or sense strand of a dsRNA. In certain embodiments, longer, extended overhangs are possible.

[0199] A dsRNA can be synthesized by standard methods known in the art as further discussed below, e.g., by use of an automated DNA synthesizer, such as are commercially available from, for example, Biosearch, Applied Biosystems, Inc.

[0200] iRNA compounds of the invention may be prepared using a two-step procedure. First, the individual strands of the double stranded RNA molecule are prepared separately. Then, the component strands are annealed. The individual strands of the siRNA compound can be prepared using solution-phase or solid-phase organic synthesis or both. Organic synthesis offers the advantage that the oligonucleotide strands comprising unnatural or modified nucleotides can be easily prepared. Single-stranded oligonucleotides of the invention can be prepared using solution-phase or solid-phase organic synthesis or both.

[0201] In one aspect, a dsRNA of the invention includes at least two nucleotide sequences, a sense sequence and an anti-sense sequence. The sense strand is selected from the group of sequences provided in any one of Tables 1, 3, 5, 6, and 7, and the corresponding antisense strand of the sense strand is selected from the group of sequences of any one of Tables 1, 3, 5, 6, and 7. In this aspect, one of the two sequences is complementary to the other of the two sequences, with one of the sequences being substantially complementary to a sequence of an mRNA generated in the expression of a TTR gene. As such, in this aspect, a dsRNA will include two oligonucleotides, where one oligonucleotide is described as the sense strand in any one of Tables 1, 3, 5, 6, and 7, and the second oligonucleotide is described as the corresponding antisense strand of the sense strand in any one of Tables 1, 3, 5, 6, and 7. In one embodiment, the substantially complementary sequences of the dsRNA are contained on separate oligonucleotides. In another embodiment, the substantially complementary sequences of the dsRNA are contained on a single oligonucleotide.

[0202] It will be understood that, although some of the sequences in Tables 1, 3, 5, 6, and 7 are described as modified and/or conjugated sequences, the RNA of the iRNA of the invention e.g., a dsRNA of the invention, may comprise any one of the sequences set forth in Tables 1, 3, 5, 6, and 7 that is un-modified, un-conjugated, and/or modified and/or conjugated differently than described therein.

[0203] The skilled person is well aware that dsRNAs having a duplex structure of between about 20 and 23 base pairs, e.g., 21, base pairs have been hailed as particularly effective in inducing RNA interference (Elbashir et al., EMBO 2001, 20:6877-6888). However, others have found that shorter or longer RNA duplex structures can also be effective (Chu and Rana (2007) RNA 14:1714-1719; Kim et al. (2005) Nat Biotech 23:222-226). In the embodiments described above, by virtue of the nature of the oligonucleotide sequences provided in any one of Tables 1, 3, 5, 6, and 7, dsRNAs described herein can include at least one strand of a length of minimally 21 nucleotides. It can be reasonably expected that shorter duplexes having one of the sequences of any one of Tables 1, 3, 5, 6, and 7 minus only a few nucleotides on one or both ends can be similarly effective as compared to the dsRNAs described above. Hence, dsRNAs having a sequence of at least 15, 16, 17, 18, 19, 20, or more contiguous nucleotides derived from one of the sequences of any one of Tables 1, 3, 5, 6, and 7, and differing in their ability to inhibit the expression of a TTR gene by not more than about 5, 10, 15, 20, 25, or 30% inhibition from a dsRNA comprising the full sequence, are contemplated to be within the scope of the present invention.

[0204] In addition, the RNAs provided in any one of Tables 1, 3, 5, 6, and 7 identify a site(s) in a TTR transcript that is susceptible to RISC-mediated cleavage. As such, the present invention further features iRNAs that target within one of these sites. As used herein, an iRNA is said to target within a particular site of an RNA transcript if the iRNA promotes cleavage of the transcript anywhere within that particular site. Such an iRNA will generally include at least about 15 contiguous nucleotides from one of the sequences provided in any one of Tables 1, 3, 5, 6, and 7 coupled to additional nucleotide sequences taken from the region contiguous to the selected sequence in a TTR gene.

[0205] While a target sequence is generally about 15-30 nucleotides in length, there is wide variation in the suitability of particular sequences in this range for directing cleavage of any given target RNA. Various software packages and the guidelines set out herein provide guidance for the identification of optimal target sequences for any given gene target, but an empirical approach can also be taken in which a “window” or “mask” of a given size (as a non-limiting example, 21 nucleotides) is literally or figuratively (including, e.g., in silico) placed on the target RNA sequence to identify sequences in the size range that can serve as target sequences. By moving the sequence “window” progressively one nucleotide upstream or downstream of an initial target sequence location, the next potential target sequence can be identified, until the complete set of possible sequences is identified for any given target size selected. This process, coupled with systematic synthesis and testing of the identified sequences (using assays as described herein or as known in the art) to identify those sequences that perform optimally can identify those RNA sequences that, when targeted with an iRNA agent, mediate the best inhibition of target gene expression. Thus, while the sequences identified, for example, in any one of Tables 1, 3, 5, 6, and 7 represent effective target sequences, it is contemplated that further optimization of inhibition efficiency can be achieved by progressively “walking the window” one nucleotide upstream or downstream of the given sequences to identify sequences with equal or better inhibition characteristics.

[0206] Further, it is contemplated that for any sequence identified, e.g., in any one of Tables 1, 3, 5, 6, and 7, further optimization could be achieved by systematically either adding or removing nucleotides to generate longer or shorter sequences and testing those sequences generated by walking a window of the longer or shorter size up or down the target RNA from that point. Again, coupling this approach to generating new candidate targets with testing for effectiveness of iRNAs based on those target sequences in an inhibition assay as known in the art and/or as described herein can lead to further improvements in the efficiency of inhibition. Further still, such optimized sequences can be adjusted by, e.g., the introduction of modified nucleotides as described herein or as known in the art, addition or changes in overhang, or other modifications as known in the art and/or discussed herein to further optimize the molecule (e.g., increasing serum stability or circulating half-life, increasing thermal stability, enhancing transmembrane delivery, targeting to a particular location or cell type, increasing interaction with silencing pathway enzymes, increasing release from endosomes) as an expression inhibitor.

[0207] An iRNA as described herein can contain one or more mismatches to the target sequence. In one embodiment, an iRNA as described herein contains no more than 3 mismatches. If the antisense strand of the iRNA contains mismatches to a target sequence, it is preferable that the area of mismatch is not located in the center of the region of complementarity. If the antisense strand of the iRNA contains mismatches to the target sequence, it is preferable that the mismatch be restricted to be within the last 5 nucleotides from either the 5′- or 3′-end of the region of complementarity. For example, for a 23 nucleotide iRNA agent the strand which is complementary to a region of a TTR gene, generally does not contain any mismatch within the central 13 nucleotides. The methods described herein or methods known in the art can be used to determine whether an iRNA containing a mismatch to a target sequence is effective in inhibiting the expression of a TTR gene. Consideration of the efficacy of iRNAs with mismatches in inhibiting expression of a TTR gene is important, especially if the particular region of complementarity in a TTR gene is known to have polymorphic sequence variation within the population.

### III. Modified iRNAs of the Invention

[0208] In one embodiment, the RNA of the iRNA of the invention e.g., a dsRNA, is un-modified, and does not comprise, e.g., chemical modifications and/or conjugations known in the art and described herein. In another embodiment, the RNA of an iRNA of the invention, e.g., a dsRNA, is chemically modified to enhance stability or other beneficial characteristics. In certain embodiments of the invention, substantially all of the nucleotides of an iRNA of the invention are modified. In other embodiments of the invention, all of the nucleotides of an iRNA of the invention are modified. In some embodiments, substantially all of the nucleotides of an iRNA of the invention are modified and the iRNA comprises no more than 8 2′-fluoro modifications (e.g., no more than 7 2′-fluoro modifications, no more than 6 2′-fluoro modifications, no more than 5 2′-fluoro modification, no more than 4 2′-fluoro modifications, no more than 3 2′-fluoro modifications, or no more than 2 2′-fluoro modifications) on the sense strand and no more than 6 2′-fluoro modifications (e.g., no more than 5 2′-fluoro modifications, no more than 4 2′-fluoro modifications, no more than 3 2′-fluoro modifications, or no more than 2 2′-fluoro modifications) on the antisense strand. In other embodiments, all of the nucleotides of an iRNA of the invention are modified and the iRNA comprises no more than 8 2′-fluoro modifications (e.g., no more than 7 2′-fluoro modifications, no more than 6 2′-fluoro modifications, no more than 5 2′-fluoro modification, no more than 4 2′-fluoro modifications, no more than 3 2′-fluoro modifications, or no more than 2 2′-fluoro modifications) on the sense strand and no more than 6 2′-fluoro modifications (e.g., no more than 5 2′-fluoro modifications, no more than 4 2′-fluoro modifications, no more than 3 2′-fluoro modifications, or no more than 2 2′-fluoro modifications) on the antisense strand. iRNAs of the invention in which “substantially all of the nucleotides are modified” are largely but not wholly modified and can include not more than 5, 4, 3, 2, or 1 unmodified nucleotides.

[0209] The nucleic acids featured in the invention can be synthesized and/or modified by methods well established in the art, such as those described in “Current protocols in nucleic acid chemistry,” Beaucage, S. L. et al. (Edrs.), John Wiley & Sons, Inc., New York, NY, USA, which is hereby incorporated herein by reference. Modifications include, for example, end modifications, e.g., 5′-end modifications (phosphorylation, conjugation, inverted linkages) or 3′-end modifications (conjugation, DNA nucleotides, inverted linkages, etc.); base modifications, e.g., replacement with stabilizing bases, destabilizing bases, or bases that base pair with an expanded repertoire of partners, removal of bases (abasic nucleotides), or conjugated bases; sugar modifications (e.g., at the 2′-position or 4′-position) or replacement of the sugar; and/or backbone modifications, including modification or replacement of the phosphodiester linkages. Specific examples of iRNA compounds useful in the embodiments described herein include, but are not limited to RNAs containing modified backbones or no natural internucleoside linkages. RNAs having modified backbones include, among others, those that do not have a phosphorus atom in the backbone. For the purposes of this specification, and as sometimes referenced in the art, modified RNAs that do not have a phosphorus atom in their internucleoside backbone can also be considered to be oligonucleosides. In some embodiments, a modified iRNA will have a phosphorus atom in its internucleoside backbone.

[0210] Modified RNA backbones include, for example, phosphorothioates, chiral phosphorothioates, phosphorodithioates, phosphotriesters, aminoalkylphosphotriesters, methyl and other alkyl phosphonates including 3′-alkylene phosphonates and chiral phosphonates, phosphinates, phosphoramidates including 3′-amino phosphoramidate and aminoalkylphosphoramidates, thionophosphoramidates, thionoalkylphosphonates, thionoalkylphosphotriesters, and boranophosphates having normal 3′-5′ linkages, 2′-5′-linked analogs of these, and those having inverted polarity wherein the adjacent pairs of nucleoside units are linked 3′-5′ to 5′-3′ or 2′-5′ to 5′-2′. Various salts, mixed salts and free acid forms are also included.

[0211] Representative U.S. patents that teach the preparation of the above phosphorus-containing linkages include, but are not limited to, U.S. Pat. Nos. 3,687,808; 4,469,863; 4,476,301; 5,023,243; 5,177,195; 5,188,897; 5,264,423; 5,276,019; 5,278,302; 5,286,717; 5,321,131; 5,399,676; 5,405,939; 5,453,496; 5,455,233; 5,466,677; 5,476,925; 5,519,126; 5,536,821; 5,541,316; 5,550,111; 5,563,253; 5,571,799; 5,587,361; 5,625,050; 6,028,188; 6,124,445; 6,160,109; 6,169,170; 6,172,209; 6,239,265; 6,277,603; 6,326,199; 6,346,614; 6,444,423; 6,531,590; 6,534,639; 6,608,035; 6,683,167; 6,858,715; 6,867,294; 6,878,805; 7,015,315; 7,041,816; 7,273,933; 7,321,029; and U.S. Pat. RE39464, the entire contents of each of which are hereby incorporated herein by reference.

[0212] Modified RNA backbones that do not include a phosphorus atom therein have backbones that are formed by short chain alkyl or cycloalkyl internucleoside linkages, mixed heteroatoms and alkyl or cycloalkyl internucleoside linkages, or one or more short chain heteroatomic or heterocyclic internucleoside linkages. These include those having morpholino linkages (formed in part from the sugar portion of a nucleoside); siloxane backbones; sulfide, sulfoxide and sulfone backbones; formacetyl and thioformacetyl backbones; methylene formacetyl and thioformacetyl backbones; alkene containing backbones; sulfamate backbones; methylencimino and methylenchydrazino backbones; sulfonate and sulfonamide backbones; amide backbones; and others having mixed N, O, S and CH₂ component parts.

[0213] Representative U.S. patents that teach the preparation of the above oligonucleosides include, but are not limited to, U.S. Pat. Nos. 5,034,506; 5,166,315; 5,185,444; 5,214,134; 5,216,141; 5,235,033; 5,64,562; 5,264,564; 5,405,938; 5,434,257; 5,466,677; 5,470,967; 5,489,677; 5,541,307; 5,561,225; 5,596,086; 5,602,240; 5,608,046; 5,610,289; 5,618,704; 5,623,070; 5,663,312; 5,633,360; 5,677,437; and, 5,677,439, the entire contents of each of which are hereby incorporated herein by reference.

[0214] In other embodiments, suitable RNA mimetics are contemplated for use in iRNAs, in which both the sugar and the internucleoside linkage, i.e., the backbone, of the nucleotide units are replaced with novel groups. The base units are maintained for hybridization with an appropriate nucleic acid target compound. One such oligomeric compound, an RNA mimetic that has been shown to have excellent hybridization properties, is referred to as a peptide nucleic acid (PNA). In PNA compounds, the sugar backbone of an RNA is replaced with an amide containing backbone, in particular an aminoethylglycine backbone. The nucleobases are retained and are bound directly or indirectly to aza nitrogen atoms of the amide portion of the backbone. Representative U.S. patents that teach the preparation of PNA compounds include, but are not limited to, U.S. Pat. Nos. 5,539,082; 5,714,331; and 5,719,262, the entire contents of each of which are hereby incorporated herein by reference. Additional PNA compounds suitable for use in the iRNAs of the invention are described in, for example, in Nielsen et al., Science, 1991, 254, 1497-1500.

[0215] Some embodiments featured in the invention include RNAs with phosphorothioate backbones and oligonucleosides with heteroatom backbones, and in particular —CH₂—NH—CH₂—, —CH₂—N(CH₃)—O—CH₂— [known as a methylene (methylimino) or MMI backbone], —CH₂—O—N(CH₃)—CH₂—, —CH₂—N(CH₃)—N(CH₃)—CH₂— and —N(CH₃)—CH₂—CH₂— [wherein the native phosphodiester backbone is represented as —O—P—O—CH₂—] of the above-referenced U.S. Pat. No. 5,489,677, and the amide backbones of the above-referenced U.S. Pat. No. 5,602,240. In some embodiments, the RNAs featured herein have morpholino backbone structures of the above-referenced U.S. Pat. No. 5,034,506.

[0216] Modified RNAs can also contain one or more substituted sugar moieties. The iRNAs, e.g., dsRNAs, featured herein can include one of the following at the 2′-position: OH; F; O-, S-, or N-alkyl; O-, S-, or N-alkenyl; O-, S- or N-alkynyl; or O-alkyl-O-alkyl, wherein the alkyl, alkenyl and alkynyl can be substituted or unsubstituted C₁ to C₁₀ alkyl or C₂ to C₁₀ alkenyl and alkynyl. Exemplary suitable modifications include O[(CH₂)ₙO]ₘCH₃, O(CH₂)·ₙOCH₃, O(CH₂)ₙNH₂, O(CH₂)ₙCH₃, O(CH₂)ₙONH₂, and O(CH₂)ₙON[(CH₂)ₙCH₃)]₂, where n and m are from 1 to about 10. In other embodiments, dsRNAs include one of the following at the 2′ position: C₁ to C₁₀ lower alkyl, substituted lower alkyl, alkaryl, aralkyl, O-alkaryl or O-aralkyl, SH, SCH₃, OCN, Cl, Br, CN, CF₃, OCF₃, SOCH₃, SO₂CH₃, ONO₂, NO₂, N₃, NH₂, heterocycloalkyl, heterocycloalkaryl, aminoalkylamino, polyalkylamino, substituted silyl, an RNA cleaving group, a reporter group, an intercalator, a group for improving the pharmacokinetic properties of an iRNA, or a group for improving the pharmacodynamic properties of an iRNA, and other substituents having similar properties. In some embodiments, the modification includes a 2′-methoxyethoxy (2′-O—CH₂CH₂OCH₃, also known as 2′-O-(2-methoxyethyl) or 2′-MOE) (Martin et al., Helv. Chim. Acta, 1995, 78:486-504) i.e., an alkoxy-alkoxy group. Another exemplary modification is 2′-dimethylaminooxyethoxy, i.e., a O(CH₂)₂ON (CH₃)₂ group, also known as 2′-DMAOE, as described in examples herein below, and 2′-dimethylaminoethoxyethoxy (also known in the art as 2′-O-dimethylaminoethoxyethyl or 2′-DMAEOE), i.e., 2′-O—CH₂—O—CH₂—N(CH₂)₂.

[0217] Other modifications include 2′-methoxy (2′-OCH₃), 2′-aminopropoxy (2′-OCH₂CH₂CH₂NH₂) and 2′-fluoro (2′-F). Similar modifications can also be made at other positions on the RNA of an iRNA, particularly the 3′ position of the sugar on the 3′ terminal nucleotide or in 2′-5′ linked dsRNAs and the 5′ position of 5′ terminal nucleotide. iRNAs can also have sugar mimetics such as cyclobutyl moieties in place of the pentofuranosyl sugar. Representative U.S. patents that teach the preparation of such modified sugar structures include, but are not limited to, U.S. Pat. Nos. 4,981,957; 5,118,800; 5,319,080; 5,359,044; 5,393,878; 5,446,137; 5,466,786; 5,514,785; 5,519,134; 5,567,811; 5,576,427; 5,591,722; 5,597,909; 5,610,300; 5,627,053; 5,639,873; 5,646,265; 5,658,873; 5,670,633; and 5,700,920, certain of which are commonly owned with the instant application. The entire contents of each of the foregoing are hereby incorporated herein by reference.

[0218] The RNA of an iRNA of the invention can also include nucleobase (often referred to in the art simply as “base”) modifications or substitutions. As used herein, “unmodified” or “natural” nucleobases include the purine bases adenine (A) and guanine (G), and the pyrimidine bases thymine (T), cytosine (C) and uracil (U). Modified nucleobases include other synthetic and natural nucleobases such as deoxy-thymine (dT), 5-methylcytosine (5-me-C), 5-hydroxymethyl cytosine, xanthine, hypoxanthine, 2-aminoadenine, 6-methyl and other alkyl derivatives of adenine and guanine, 2-propyl and other alkyl derivatives of adenine and guanine, 2-thiouracil, 2-thiothymine and 2-thiocytosine, 5-halouracil and cytosine, 5-propynyl uracil and cytosine, 6-azo uracil, cytosine and thymine, 5-uracil (pseudouracil), 4-thiouracil, 8-halo, 8-amino, 8-thiol, 8-thioalkyl, 8-hydroxyl anal other 8-substituted adenines and guanines, 5-halo, particularly 5-bromo, 5-trifluoromethyl and other 5-substituted uracils and cytosines, 7-methylguanine and 7-methyladenine, 8-azaguanine and 8-azaadenine, 7-deazaguanine and 7-daazaadenine and 3-deazaguanine and 3-deazaadenine. Further nucleobases include those disclosed in U.S. Pat. No. 3,687,808, those disclosed in Modified Nucleosides in Biochemistry, Biotechnology and Medicine, Herdewijn, P. ed. Wiley-VCH, 2008; those disclosed in The Concise Encyclopedia Of Polymer Science And Engineering, pages 858-859, Kroschwitz, J. L, cd. John Wiley & Sons, 1990, these disclosed by Englisch et al., Angewandte Chemie, International Edition, 1991, 30, 613, and those disclosed by Sanghvi, Y S., Chapter 15, dsRNA Research and Applications, pages 289-302, Crooke, S. T. and Lebleu, B., Ed., CRC Press, 1993. Certain of these nucleobases are particularly useful for increasing the binding affinity of the oligomeric compounds featured in the invention. These include 5-substituted pyrimidines, 6-azapyrimidines and N-2, N-6 and 0-6 substituted purines, including 2-aminopropyladenine, 5-propynyluracil and 5-propynylcytosine. 5-methylcytosine substitutions have been shown to increase nucleic acid duplex stability by 0.6-1.2° C. (Sanghvi, Y. S., Crooke, S. T. and Lebleu, B., Eds., dsRNA Research and Applications, CRC Press, Boca Raton, 1993, pp. 276-278) and are exemplary base substitutions, even more particularly when combined with 2′-O-methoxyethyl sugar modifications.

[0219] Representative U.S. patents that teach the preparation of certain of the above noted modified nucleobases as well as other modified nucleobases include, but are not limited to, the above noted U.S. Pat. Nos. 3,687,808, 4,845,205; 5,130,30; 5,134,066; 5,175,273; 5,367,066; 5,432,272; 5,457,187; 5,459,255; 5,484,908; 5,502,177; 5,525,711; 5,552,540; 5,587,469; 5,594,121, 5,596,091; 5,614,617; 5,681,941; 5,750,692; 6,015,886; 6,147,200; 6, 166, 197; 6,222,025; 6,235,887; 6,380,368; 6,528,640; 6,639,062; 6,617,438; 7,045,610; 7,427,672; and 7,495,088, the entire contents of each of which are hereby incorporated herein by reference.

[0220] The RNA of an iRNA can also be modified to include one or more bicyclic sugar moities. A “bicyclic sugar” is a furanosyl ring modified by the bridging of two atoms. A “bicyclic nucleoside” (“BNA”) is a nucleoside having a sugar moiety comprising a bridge connecting two carbon atoms of the sugar ring, thereby forming a bicyclic ring system. In certain embodiments, the bridge connects the 4′-carbon and the 2′-carbon of the sugar ring. Thus, in some embodiments an agent of the invention may include one or more locked nucleic acids (LNA). A locked nucleic acid is a nucleotide having a modified ribose moiety in which the ribose moiety comprises an extra bridge connecting the 2′ and 4′ carbons. In other words, an LNA is a nucleotide comprising a bicyclic sugar moiety comprising a 4′-CH2-O-2′ bridge. This structure effectively “locks” the ribose in the 3′-endo structural conformation. The addition of locked nucleic acids to siRNAs has been shown to increase siRNA stability in serum, and to reduce off-target effects (Elmen, J. et al., (2005) Nucleic Acids Research 33 (1): 439-447; Mook, OR. et al., (2007) Mol Canc Ther 6 (3): 833-843; Grunweller, A. et al., (2003) Nucleic Acids Research 31 (12): 3185-3193). Examples of bicyclic nucleosides for use in the polynucleotides of the invention include without limitation nucleosides comprising a bridge between the 4′ and the 2′ ribosyl ring atoms. In certain embodiments, the antisense polynucleotide agents of the invention include one or more bicyclic nucleosides comprising a 4′ to 2′ bridge. Examples of such 4′ to 2′ bridged bicyclic nucleosides, include but are not limited to 4′-(CH2)-O-2′ (LNA); 4′-(CH2)-S-2′; 4′-(CH2) 2-O-2′ (ENA); 4′-CH (CH3)-O-2′ (also referred to as “constrained ethyl” or “cEt”) and 4′-CH (CH2OCH3)-O-2′ (and analogs thereof; see, e.g., U.S. Pat. No. 7,399,845); 4′-C(CH3) (CH3)-O-2′ (and analogs thereof; see e.g., U.S. Pat. No. 8,278,283); 4′-CH2-N(OCH3)-2′ (and analogs thereof; see e.g., U.S. Pat. No. 8,278,425); 4′-CH2-O-N(CH3)-2′ (see, e.g., U.S. Patent Publication No. 2004/0171570); 4′-CH2-N(R)—O-2′, wherein R is H, C1-C12 alkyl, or a protecting group (see, e.g., U.S. Pat. No. 7,427,672); 4′-CH2-C(H) (CH3)-2′ (see, e.g., Chattopadhyaya et al., J. Org. Chem., 2009, 74, 118-134); and 4′-CH2-C(═CH2)-2′ (and analogs thereof; see, e.g., U.S. Pat. No. 8,278,426). The entire contents of each of the foregoing are hereby incorporated herein by reference.

[0221] Additional representative U.S. patents and US Patent Publications that teach the preparation of locked nucleic acid nucleotides include, but are not limited to, the following: U.S. Pat. Nos. 6,268,490; 6,525,191; 6,670,461; 6,770,748; 6,794,499; 6,998,484; 7,053,207; 7,034,133; 7,084,125; 7,399,845; 7,427,672; 7,569,686; 7,741,457; 8,022,193; 8,030,467; 8,278,425; 8,278,426; 8,278,283; US 2008/0039618; and US 2009/0012281, the entire contents of each of which are hereby incorporated herein by reference.

[0222] Any of the foregoing bicyclic nucleosides can be prepared having one or more stereochemical sugar configurations including for example α-L-ribofuranose and β-D-ribofuranose (see WO 99/14226).

[0223] The RNA of an iRNA can also be modified to include one or more constrained ethyl nucleotides. As used herein, a “constrained ethyl nucleotide” or “cEt” is a locked nucleic acid comprising a bicyclic sugar moiety comprising a 4′-CH(CH3)-O-2′ bridge. In one embodiment, a constrained ethyl nucleotide is in the S conformation referred to herein as “S-cEt.”

[0224] An iRNA of the invention may also include one or more “conformationally restricted nucleotides” (“CRN”). CRN are nucleotide analogs with a linker connecting the C2′ and C4′ carbons of ribose or the C3 and —C5′ carbons of ribose. CRN lock the ribose ring into a stable conformation and increase the hybridization affinity to mRNA. The linker is of sufficient length to place the oxygen in an optimal position for stability and affinity resulting in less ribose ring puckering.

[0225] Representative publications that teach the preparation of certain of the above noted CRN include, but are not limited to, US Patent Publication No. 2013/0190383; and PCT publication WO 2013/036868, the entire contents of each of which are hereby incorporated herein by reference.

[0226] One or more of the nucleotides of an iRNA of the invention may also include a hydroxymethyl substituted nucleotide. A “hydroxymethyl substituted nucleotide” is an acyclic 2′-3′-seco-nucleotide, also referred to as an “unlocked nucleic acid” (“UNA”) modification.

[0227] Representative U.S. publications that teach the preparation of UNA include, but are not limited to, U.S. Pat. No. 8,314,227; and US Patent Publication Nos. 2013/0096289; 2013/0011922; and 2011/0313020, the entire contents of each of which are hereby incorporated herein by reference.

[0228] Potentially stabilizing modifications to the ends of RNA molecules can include N-(acctylaminocaproyl)-4-hydroxyprolinol (Hyp-C6-NHAc), N-(caproyl-4-hydroxyprolinol (Hyp-C6), N-(acetyl-4-hydroxyprolinol (Hyp-NHAc), thymidine-2′-O-deoxythymidine (ether), N-(aminocaproyl)-4-hydroxyprolinol (Hyp-C6-amino), 2-docosanoyl-uridine-3″-phosphate, inverted base dT (idT) and others. Disclosure of this modification can be found in PCT Publication No. WO 2011/005861.

[0229] Other modifications of the nucleotides of an iRNA of the invention include a 5′ phosphate or 5′ phosphate mimic, e.g., a 5′-terminal phosphate or phosphate mimic on the antisense strand of an RNAi agent. Suitable phosphate mimics are disclosed in, for example US Patent Publication No. 2012/0157511, the entire contents of which are incorporated herein by reference.

A. Modified iRNAs Comprising Motifs of the Invention

[0230] In certain aspects of the invention, the double stranded RNAi agents of the invention include chemical modifications as disclosed, for example, in U.S. Provisional Application No. 61/561,710, filed on Nov. 18, 2011, or in PCT/US2012/065691, filed on Nov. 16, 2012, the entire contents of each of which are incorporated herein by reference.

[0231] More specifically, it has been surprisingly discovered that when the sense strand and antisense strand of the double stranded RNAi agent are modified to have one or more motifs of three identical modifications on three consecutive nucleotides at or near the cleavage site of at least one strand of an RNAi agent, the gene silencing acitivity of the RNAi agent was superiorly enhanced.

[0232] Accordingly, the invention provides double stranded RNAi agents capable of inhibiting the expression of a target gene (i.e., TTR gene) in vivo. The RNAi agent comprises a sense strand and an antisense strand. Each strand of the RNAi agent may range from 12-30 nucleotides in length. For example, each strand may be between 14-30 nucleotides in length, 17-30 nucleotides in length, 25-30 nucleotides in length, 27-30 nucleotides in length, 17-23 nucleotides in length, 17-21 nucleotides in length, 17-19 nucleotides in length, 19-25 nucleotides in length, 19-23 nucleotides in length, 19-21 nucleotides in length, 21-25 nucleotides in length, or 21-23 nucleotides in length.

[0233] The sense strand and antisense strand typically form a duplex double stranded RNA (“dsRNA”), also referred to herein as an “RNAi agent.” The duplex region of an RNAi agent may be 12-30 nucleotide pairs in length. For example, the duplex region can be between 14-30 nucleotide pairs in length, 17-30 nucleotide pairs in length, 27-30 nucleotide pairs in length, 17-23 nucleotide pairs in length, 17-21 nucleotide pairs in length, 17-19 nucleotide pairs in length, 19-25 nucleotide pairs in length, 19-23 nucleotide pairs in length, 19-21 nucleotide pairs in length, 21-25 nucleotide pairs in length, or 21-23 nucleotide pairs in length. In another example, the duplex region is selected from 15, 16, 17, 18, 19, 20, 21, 22, 23, 24, 25, 26, and 27 nucleotides in length.

[0234] In one embodiment, the RNAi agent may contain one or more overhang regions and/or capping groups at the 3′-end, 5′-end, or both ends of one or both strands. The overhang can be 1-6 nucleotides in length, for instance 2-6 nucleotides in length, 1-5 nucleotides in length, 2-5 nucleotides in length, 1-4 nucleotides in length, 2-4 nucleotides in length, 1-3 nucleotides in length, 2-3 nucleotides in length, or 1-2 nucleotides in length. The overhangs can be the result of one strand being longer than the other, or the result of two strands of the same length being staggered. The overhang can form a mismatch with the target mRNA or it can be complementary to the gene sequences being targeted or can be another sequence. The first and second strands can also be joined, e.g., by additional bases to form a hairpin, or by other non-base linkers.

[0235] In one embodiment, the nucleotides in the overhang region of the RNAi agent can each independently be a modified or unmodified nucleotide including, but not limited to 2′-sugar modified, such as, 2-F, 2′-O-methyl, thymidine (T), 2′-O-methoxycthyl-5-methyluridine (Tco), 2′-O-methoxyethyladenosine (Aco), 2′-O-methoxyethyl-5-methylcytidine (m5Cco), and any combinations thereof. For example, TT can be an overhang sequence for either end on either strand. The overhang can form a mismatch with the target mRNA or it can be complementary to the gene sequences being targeted or can be another sequence.

[0236] The 5′- or 3′-overhangs at the sense strand, antisense strand or both strands of the RNAi agent may be phosphorylated. In some embodiments, the overhang region(s) contains two nucleotides having a phosphorothioate between the two nucleotides, where the two nucleotides can be the same or different. In one embodiment, the overhang is present at the 3′-end of the sense strand, antisense strand, or both strands. In one embodiment, this 3′-overhang is present in the antisense strand. In one embodiment, this 3′-overhang is present in the sense strand.

[0237] The RNAi agent may contain only a single overhang, which can strengthen the interference activity of the RNAi, without affecting its overall stability. For example, the single-stranded overhang may be located at the 3′-terminal end of the sense strand or, alternatively, at the 3′-terminal end of the antisense strand. The RNAi may also have a blunt end, located at the 5′-end of the antisense strand (or the 3′-end of the sense strand) or vice versa. Generally, the antisense strand of the RNAi has a nucleotide overhang at the 3′-end, and the 5′-end is blunt. While not wishing to be bound by theory, the asymmetric blunt end at the 5′-end of the antisense strand and 3′-end overhang of the antisense strand favor the guide strand loading into RISC process.

[0238] In one embodiment, the RNAi agent comprises a 21 nucleotide sense strand and a 23 nucleotide antisense strand, wherein the sense strand contains at least one motif of three 2′-F modifications on three consecutive nucleotides at positions 9, 10, 11 from the 5′end; the antisense strand contains at least one motif of three 2′-O-methyl modifications on three consecutive nucleotides at positions 11, 12, 13 from the 5′end, wherein one end of the RNAi agent is blunt, while the other end comprises a 2 nucleotide overhang. Preferably, the 2 nucleotide overhang is at the 3′-end of the antisense strand.

[0239] When the 2 nucleotide overhang is at the 3′-end of the antisense strand, there may be two phosphorothioate internucleotide linkages between the terminal three nucleotides, wherein two of the three nucleotides are the overhang nucleotides, and the third nucleotide is a paired nucleotide next to the overhang nucleotide. In one embodiment, the RNAi agent additionally has two phosphorothioate internucleotide linkages between the terminal three nucleotides at both the 5′-end of the sense strand and at the 5′-end of the antisense strand. In one embodiment, every nucleotide in the sense strand and the antisense strand of the RNAi agent, including the nucleotides that are part of the motifs are modified nucleotides. In one embodiment each residue is independently modified with a 2′-O-methyl or 3′-fluoro, e.g., in an alternating motif. In one embodiment, all of the nucleotides of an iRNA of the invention are modified and the iRNA comprises no more than 8 2′-fluoro modifications (e.g., no more than 7 2′-fluoro modifications, no more than 6 2′-fluoro modifications, no more than 5 2′-fluoro modifications, no more than 4 2′-fluoro modifications, no more than 3 2′-fluoro modifications, or no more than 2 2′-fluoro modifications) on the sense strand and no more than 6 2′-fluoro modifications (e.g., no more than 5 2′-fluoro modifications, no more than 4 2′-fluoro modifications, no more than 3 2′-fluoro modifications, or no more than 2 2′-fluoro modifications) on the antisense strand. Optionally, the RNAi agent further comprises a ligand (preferably GalNAc₃).

[0240] In one embodiment, the sense strand of the RNAi agent contains at least one motif of three identical modifications on three consecutive nucleotides, where one of the motifs occurs at the cleavage site in the sense strand.

[0241] In one embodiment, the antisense strand of the RNAi agent can also contain at least one motif of three identical modifications on three consecutive nucleotides, where one of the motifs occurs at or near the cleavage site in the antisense strand

[0242] For an RNAi agent having a duplex region of 17-23 nucleotide in length, the cleavage site of the antisense strand is typically around the 10, 11 and 12 positions from the 5′-end. Thus the motifs of three identical modifications may occur at the 9, 10, 11 positions; 10, 11, 12 positions; 11, 12, 13 positions; 12, 13, 14 positions; or 13, 14, 15 positions of the antisense strand, the count starting from the 1st nucleotide from the 5′-end of the antisense strand, or, the count starting from the 1st paired nucleotide within the duplex region from the 5′-end of the antisense strand. The cleavage site in the antisense strand may also change according to the length of the duplex region of the RNAi from the 5′-end.

[0243] The sense strand of the RNAi agent may contain at least one motif of three identical modifications on three consecutive nucleotides at the cleavage site of the strand; and the antisense strand may have at least one motif of three identical modifications on three consecutive nucleotides at or near the cleavage site of the strand. When the sense strand and the antisense strand form a dsRNA duplex, the sense strand and the antisense strand can be so aligned that one motif of the three nucleotides on the sense strand and one motif of the three nucleotides on the antisense strand have at least one nucleotide overlap, i.e., at least one of the three nucleotides of the motif in the sense strand forms a base pair with at least one of the three nucleotides of the motif in the antisense strand. Alternatively, at least two nucleotides may overlap, or all three nucleotides may overlap.

[0244] In one embodiment, every nucleotide in the sense strand and antisense strand of the RNAi agent, including the nucleotides that are part of the motifs, may be modified. Each nucleotide may be modified with the same or different modification which can include one or more alteration of one or both of the non-linking phosphate oxygens and/or of one or more of the linking phosphate oxygens; alteration of a constituent of the ribose sugar, e.g., of the 2′ hydroxyl on the ribose sugar; wholesale replacement of the phosphate moiety with “dephospho” linkers; modification or replacement of a naturally occurring base; and replacement or modification of the ribose-phosphate backbone.

[0245] As nucleic acids are polymers of subunits, many of the modifications occur at a position which is repeated within a nucleic acid, e.g., a modification of a base, or a phosphate moiety, or a non-linking O of a phosphate moiety. In some cases the modification will occur at all of the subject positions in the nucleic acid but in many cases it will not. By way of example, a modification may only occur at a 3′ or 5′ terminal position, may only occur in a terminal region, e.g., at a position on a terminal nucleotide or in the last 2, 3, 4, 5, or 10 nucleotides of a strand. A modification may occur in a double strand region, a single strand region, or in both. A modification may occur only in the double strand region of a RNA or may only occur in a single strand region of a RNA. For example, a phosphorothioate modification at a non-linking O position may only occur at one or both termini, may only occur in a terminal region, e.g., at a position on a terminal nucleotide or in the last 2, 3, 4, 5, or 10 nucleotides of a strand, or may occur in double strand and single strand regions, particularly at termini. The 5′ end or ends can be phosphorylated.

[0246] It may be possible, e.g., to enhance stability, to include particular bases in overhangs, or to include modified nucleotides or nucleotide surrogates, in single strand overhangs, e.g., in a 5′ or 3′ overhang, or in both. For example, it can be desirable to include purine nucleotides in overhangs. In some embodiments all or some of the bases in a 3′ or 5′ overhang may be modified, e.g., with a modification described herein. Modifications can include, e.g., the use of modifications at the 2′ position of the ribose sugar with modifications that are known in the art, e.g., the use of deoxyribonucleotides, 2′-deoxy-2′-fluoro (2′-F) or 2′-O-methyl modified instead of the ribosugar of the nucleobase, and modifications in the phosphate group, e.g., phosphorothioate modifications. Overhangs need not be homologous with the target sequence.

[0247] In one embodiment, each residue of the sense strand and antisense strand is independently modified with LNA, CRN, CET, UNA, HNA, CeNA, 2′-methoxyethyl, 2′-O-methyl, 2′-O-allyl, 2′-C-allyl, 2′-deoxy, 2′-hydroxyl, or 2′-fluoro. The strands can contain more than one modification. In one embodiment, each residue of the sense strand and antisense strand is independently modified with 2′-O-methyl or 2′-fluoro.

[0248] At least two different modifications are typically present on the sense strand and antisense strand. Those two modifications may be the 2′-O-methyl or 2′-fluoro modifications, or others.

[0249] In one embodiment, the Nₐ and/or N_{b} comprise modifications of an alternating pattern. The term “alternating motif” as used herein refers to a motif having one or more modifications, each modification occurring on alternating nucleotides of one strand. The alternating nucleotide may refer to one per every other nucleotide or one per every three nucleotides, or a similar pattern. For example, if A, B and C each represent one type of modification to the nucleotide, the alternating motif can be “ABABABABABAB . . . ,” “AABAABAABAAB . . . ,” “AAABAAABAAAB . . . ,” “AAABBBAAABBB . . . ,” “AABBAABBAABB . . . ,” or “ABCABCABCABC . . . ,” etc.

[0250] The type of modifications contained in the alternating motif may be the same or different. For example, if A, B, C, D each represent one type of modification on the nucleotide, the alternating pattern, i.e., modifications on every other nucleotide, may be the same, but each of the sense strand or antisense strand can be selected from several possibilities of modifications within the alternating motif such as “ABABAB . . . ,” “ACACAC . . . ,” “BDBDBD . . . ,” or “CDCDCD . . . ,” etc.

[0251] In one embodiment, the RNAi agent of the invention comprises the modification pattern for the alternating motif on the sense strand relative to the modification pattern for the alternating motif on the antisense strand is shifted. The shift may be such that the modified group of nucleotides of the sense strand corresponds to a differently modified group of nucleotides of the antisense strand and vice versa. For example, the sense strand when paired with the antisense strand in the dsRNA duplex, the alternating motif in the sense strand may start with “ABABAB” from 5′-3′ of the strand and the alternating motif in the antisense strand may start with “BABABA” from 5′-3′ of the strand within the duplex region. As another example, the alternating motif in the sense strand may start with “AABBAABB” from 5′-3′ of the strand and the alternating motif in the antisenese strand may start with “BBAABBAA” from 5′-3′ of the strand within the duplex region, so that there is a complete or partial shift of the modification patterns between the sense strand and the antisense strand.

[0252] In one embodiment, the RNAi agent comprises the pattern of the alternating motif of 2′-O-methyl modification and 2′-F modification on the sense strand initially has a shift relative to the pattern of the alternating motif of 2′-O-methyl modification and 2′-F modification on the antisense strand initially, i.e., the 2′-O-methyl modified nucleotide on the sense strand base pairs with a 2′-F modified nucleotide on the antisense strand and vice versa. The I position of the sense strand may start with the 2′-F modification, and the 1 position of the antisense strand may start with the 2′-O-methyl modification.

[0253] The introduction of one or more motifs of three identical modifications on three consecutive nucleotides to the sense strand and/or antisense strand interrupts the initial modification pattern present in the sense strand and/or antisense strand. This interruption of the modification pattern of the sense and/or antisense strand by introducing one or more motifs of three identical modifications on three consecutive nucleotides to the sense and/or antisense strand surprisingly enhances the gene silencing activity to the target gene.

[0254] In one embodiment, when the motif of three identical modifications on three consecutive nucleotides is introduced to any of the strands, the modification of the nucleotide next to the motif is a different modification than the modification of the motif. For example, the portion of the sequence containing the motif is “ . . . . NₐYYYN_{b} . . . ,” where “Y” represents the modification of the motif of three identical modifications on three consecutive nucleotide, and “Nₐ” and “N_{b}” represent a modification to the nucleotide next to the motif “YYY” that is different than the modification of Y, and where Nₐ and N_{b} can be the same or different modifications. Alternatively, Nₐ and/or N_{b} may be present or absent when there is a wing modification present.

[0255] The RNAi agent may further comprise at least one phosphorothioate or methylphosphonate internucleotide linkage. The phosphorothioate or methylphosphonate internucleotide linkage modification may occur on any nucleotide of the sense strand or antisense strand or both strands in any position of the strand. For instance, the internucleotide linkage modification may occur on every nucleotide on the sense strand and/or antisense strand; each internucleotide linkage modification may occur in an alternating pattern on the sense strand and/or antisense strand; or the sense strand or antisense strand may contain both internucleotide linkage modifications in an alternating pattern. The alternating pattern of the internucleotide linkage modification on the sense strand may be the same or different from the antisense strand, and the alternating pattern of the internucleotide linkage modification on the sense strand may have a shift relative to the alternating pattern of the internucleotide linkage modification on the antisense strand. In one embodiment, a double-stranded RNAi agent comprises 6-8phosphorothioate internucleotide linkages. In one embodiment, the antisense strand comprises two phosphorothioate internucleotide linkages at the 5′-terminus and two phosphorothioate internucleotide linkages at the 3′-terminus, and the sense strand comprises at least two phosphorothioate internucleotide linkages at either the 5′-terminus or the 3′-terminus.

[0256] In one embodiment, the RNAi comprises a phosphorothioate or methylphosphonate internucleotide linkage modification in the overhang region. For example, the overhang region may contain two nucleotides having a phosphorothioate or methylphosphonate internucleotide linkage between the two nucleotides. Internucleotide linkage modifications also may be made to link the overhang nucleotides with the terminal paired nucleotides within the duplex region. For example, at least 2, 3, 4, or all the overhang nucleotides may be linked through phosphorothioate or methylphosphonate internucleotide linkage, and optionally, there may be additional phosphorothioate or methylphosphonate internucleotide linkages linking the overhang nucleotide with a paired nucleotide that is next to the overhang nucleotide. For instance, there may be at least two phosphorothioate internucleotide linkages between the terminal three nucleotides, in which two of the three nucleotides are overhang nucleotides, and the third is a paired nucleotide next to the overhang nucleotide. These terminal three nucleotides may be at the 3′-end of the antisense strand, the 3′-end of the sense strand, the 5′-end of the antisense strand, and/or the 5′end of the antisense strand.

[0257] In one embodiment, the 2 nucleotide overhang is at the 3′-end of the antisense strand, and there are two phosphorothioate internucleotide linkages between the terminal three nucleotides, wherein two of the three nucleotides are the overhang nucleotides, and the third nucleotide is a paired nucleotide next to the overhang nucleotide. Optionally, the RNAi agent may additionally have two phosphorothioate internucleotide linkages between the terminal three nucleotides at both the 5′-end of the sense strand and at the 5′-end of the antisense strand.

[0258] In one embodiment, the RNAi agent comprises mismatch(es) with the target, within the duplex, or combinations thereof. The mistmatch may occur in the overhang region or the duplex region. The base pair may be ranked on the basis of their propensity to promote dissociation or melting (e.g., on the free energy of association or dissociation of a particular pairing, the simplest approach is to examine the pairs on an individual pair basis, though next neighbor or similar analysis can also be used). In terms of promoting dissociation: A:U is preferred over G:C; G:U is preferred over G:C; and I:C is preferred over G:C (I=inosine). Mismatches, e.g., non-canonical or other than canonical pairings (as described elsewhere herein) are preferred over canonical (A:T, A:U, G:C) pairings; and pairings which include a universal base are preferred over canonical pairings.

[0259] In one embodiment, the RNAi agent comprises at least one of the first 1, 2, 3, 4, or 5 base pairs within the duplex regions from the 5′-end of the antisense strand independently selected from the group of: A:U, G:U, I:C, and mismatched pairs, e.g., non-canonical or other than canonical pairings or pairings which include a universal base, to promote the dissociation of the antisense strand at the 5′-end of the duplex.

[0260] In one embodiment, the nucleotide at the 1 position within the duplex region from the 5′-end in the antisense strand is selected from the group consisting of A, dA, dU, U, and dT. Alternatively, at least one of the first 1, 2 or 3 base pair within the duplex region from the 5′-end of the antisense strand is an AU base pair. For example, the first base pair within the duplex region from the 5′-end of the antisense strand is an AU base pair.

[0261] In one embodiment, the sense strand sequence may be represented by formula (I):

5′ nₚ-Nₐ-(X X X)ᵢ-N_{b}-Y Y Y-N_{b}-(Z Z Z)ⱼ-Nₐ-n_{q} 3′ (I)

[0262] wherein:
[0263] i and j are each independently 0 or 1;
[0264] p and q are each independently 0-6;
[0265] each Nₐ independently represents an oligonucleotide sequence comprising 0-25 modified nucleotides, each sequence comprising at least two differently modified nucleotides;
[0266] each N_{b} independently represents an oligonucleotide sequence comprising 0-10 modified nucleotides;
[0267] each nₚ and nq independently represent an overhang nucleotide;
[0268] wherein N_{b} and Y do not have the same modification; and
[0269] XXX, YYY and ZZZ each independently represent one motif of three identical modifications on three consecutive nucleotides. Preferably YYY is all 2′-F modified nucleotides.

[0270] In one embodiment, the Nₐ and/or N_{b} comprise modifications of alternating pattern.

[0271] In one embodiment, the YYY motif occurs at or near the cleavage site of the sense strand. For example, when the RNAi agent has a duplex region of 17-23 nucleotides in length, the YYY motif can occur at or the vicinity of the cleavage site (e.g.: can occur at positions 6, 7, 8, 7, 8, 9, 8, 9, 10, 9, 10, 11, 10, 11,12 or 11, 12, 13) of—the sense strand, the count starting from the 1^{st} nucleotide, from the 5′-end; or optionally, the count starting at the 1^{st} paired nucleotide within the duplex region, from the 5′-end.

[0272] In one embodiment, i is 1 and j is 0, or i is 0 and j is 1, or both i and j are 1. The sense strand can therefore be represented by the following formulas:

5′ nₚ-Nₐ-YYY-N_{b}-ZZZ-Nₐ-n_{q} 3′ (Ib);
5′ nₚ-Nₐ-XXX-N_{b}-YYY-Nₐ-n_{q} 3′ (Ic);
or
5′ nₚ-Nₐ-XXX-N_{b}-YYY-N_{b}-ZZZ-Nₐ-n_{q} 3′ (Id).

[0273] When the sense strand is represented by formula (Ib), N_{b} represents an oligonucleotide sequence comprising 0-10, 0-7, 0-5, 0-4, 0-2 or 0 modified nucleotides. Each Nₐ independently can represent an oligonucleotide sequence comprising 2-20, 2-15, or 2-10 modified nucleotides.

[0274] When the sense strand is represented as formula (Ic), N_{b} represents an oligonucleotide sequence comprising 0-10, 0-7, 0-10, 0-7, 0-5, 0-4, 0-2 or 0 modified nucleotides. Each Nₐ can independently represent an oligonucleotide sequence comprising 2-20, 2-15, or 2-10 modified nucleotides.

[0275] When the sense strand is represented as formula (Id), each N_{b} independently represents an oligonucleotide sequence comprising 0-10, 0-7, 0-5, 0-4, 0-2 or 0 modified nucleotides. Preferably, N_{b} is 0, 1, 2, 3, 4, 5 or 6 Each Nₐ can independently represent an oligonucleotide sequence comprising 2-20, 2-15, or 2-10 modified nucleotides. Each of X, Y and Z may be the same or different from each other.

[0276] In other embodiments, i is 0 and j is 0, and the sense strand may be represented by the formula:

5′ nₚ-Nₐ-YYY-Nₐ-n_{q} 3′ (Ia).

[0277] When the sense strand is represented by formula (Ia), each Nₐ independently can represent an oligonucleotide sequence comprising 2-20, 2-15, or 2-10 modified nucleotides.

[0278] In one embodiment, the antisense strand sequence of the RNAi may be represented by formula (II):

5′ n_{q′}-Nₐ′-(Z′Z′Z′)ₖ-N_{b}′-Y′Y′Y′-N_{b}′-(X′X′X′)ₗ-N′ₐ-
nₚ′ 3′ (II)

[0279] wherein:
[0280] k and l are each independently 0 or 1;
[0281] p′ and q′ are each independently 0-6;
[0282] each Nₐ′ independently represents an oligonucleotide sequence comprising 0-25 modified nucleotides, each sequence comprising at least two differently modified nucleotides;
[0283] each N_{b}′ independently represents an oligonucleotide sequence comprising 0-10 modified nucleotides;
[0284] each nₚ′ and nq′ independently represent an overhang nucleotide;
[0285] wherein N_{b}′ and Y′ do not have the same modification; and
[0286] X′X′X′, Y′Y′Y′ and Z′Z′Z′ each independently represent one motif of three identical modifications on three consecutive nucleotides.

[0287] In one embodiment, the Nₐ′ and/or N_{b}′ comprise modifications of alternating pattern.

[0288] The Y′Y′Y′ motif occurs at or near the cleavage site of the antisense strand. For example, when the RNAi agent has a duplex region of 17-23 nucleotide in length, the Y′Y′Y′ motif can occur at positions 9, 10, 11; 10, 11, 12; 11, 12, 13; 12, 13, 14; or 13, 14, 15 of the antisense strand, with the count starting from the 1st nucleotide, from the 5′-end; or optionally, the count starting at the 1st paired nucleotide within the duplex region, from the 5′-end. Preferably, the Y′Y′Y′ motif occurs at positions 11, 12, 13.

[0289] In one embodiment, Y′Y′Y′ motif is all 2′-OMe modified nucleotides.

[0290] In one embodiment, k is 1 and 1 is 0, or k is 0 and 1 is 1, or both k and I are 1.

[0291] The antisense strand can therefore be represented by the following formulas:

5′ n_{q′}-Nₐ′-Z′Z′Z′-N_{b}′-Y′Y′Y′-Nₐ′-n_{p′} 3′ (IIb);
5′ n_{q′}-Nₐ′-Y′Y′Y′-N_{b}′-X′X′X′-n_{p′} 3′ (IIc);
or
5′ n_{q′}-Nₐ′-Z′Z′Z′-N_{b}′-Y′Y′Y′-N_{b}′-X′X′X′-Nₐ′-n_{p′} 3′
(IId).

[0292] When the antisense strand is represented by formula (IIb), N_{b} represents an oligonucleotide sequence comprising 0-10, 0-7, 0-10, 0-7, 0-5, 0-4, 0-2 or 0 modified nucleotides. Each Nₐ′ independently represents an oligonucleotide sequence comprising 2-20, 2-15, or 2-10 modified nucleotides.

[0293] When the antisense strand is represented as formula (IIc), N_{b}′ represents an oligonucleotide sequence comprising 0-10, 0-7, 0-10, 0-7, 0-5, 0-4, 0-2 or 0 modified nucleotides. Each Nₐ′ independently represents an oligonucleotide sequence comprising 2-20, 2-15, or 2-10 modified nucleotides.

[0294] When the antisense strand is represented as formula (IId), each No′ independently represents an oligonucleotide sequence comprising 0-10, 0-7, 0-10, 0-7, 0-5, 0-4, 0-2 or 0 modified nucleotides. Each Nₐ′ independently represents an oligonucleotide sequence comprising 2-20, 2-15, or 2-10 modified nucleotides. Preferably, Np is 0, 1, 2, 3, 4, 5 or 6.

[0295] In other embodiments, k is 0 and 1 is 0 and the antisense strand may be represented by the formula:

5′ n_{p′}-N_{a′}-Y′Y′Y′-N_{a′}-n_{q′} 3 (Ia).

[0296] When the antisense strand is represented as formula (IIa), each Nₐ′ independently represents an oligonucleotide sequence comprising 2-20, 2-15, or 2-10 modified nucleotides.

[0297] Each of X′, Y′ and Z′ may be the same or different from each other.

[0298] Each nucleotide of the sense strand and antisense strand may be independently modified with LNA, CRN, UNA, cEt, HNA, CeNA, 2′-methoxyethyl, 2′-O-methyl, 2′-O-allyl, 2′-C-allyl, 2′-hydroxyl, or 2′-fluoro. For example, each nucleotide of the sense strand and antisense strand is independently modified with 2′-O-methyl or 2′-fluoro. Each X, Y, Z, X′, Y′ and Z′, in particular, may represent a 2′-O-methyl modification or a 2′-fluoro modification.

[0299] In one embodiment, the sense strand of the RNAi agent may contain YYY motif occurring at 9, 10 and 11 positions of the strand when the duplex region is 21 nt, the count starting from the 1^{st} nucleotide from the 5′-end, or optionally, the count starting at the 1^{st} paired nucleotide within the duplex region, from the 5′-end; and Y represents 2′-F modification.

[0300] In one embodiment the antisense strand may contain Y′Y′Y′ motif occurring at positions 11, 12, 13 of the strand, the count starting from the 1st nucleotide from the 5′-end, or optionally, the count starting at the 1st paired nucleotide within the duplex region, from the 5′-end; and Y′ represents 2′-O-methyl modification.

[0301] The sense strand represented by any one of the above formulas (Ia), (Ib), (Ic), and (Id) forms a duplex with a antisense strand being represented by any one of formulas (IIa), (IIb), (IIc), and (IId), respectively.

[0302] Accordingly, the RNAi agents for use in the methods of the invention may comprise a sense strand and an antisense strand, each strand having 14 to 30 nucleotides, the RNAi duplex represented by formula (III):

(III)
sense:
5′ nₚ-Nₐ-(X X X)ᵢ-N_{b}-Y Y Y-N_{b}-(Z Z Z)ⱼ-Nₐ-n_{q} 3′
antisense:
3′ nₚ^{′}-Nₐ^{′}-(X′X′X′)ₖ-N_{b}^{′}-Y′Y′Y′-N_{b}^{′}-(Z′Z′Z′)ₗ-Nₐ^{′}-n_{q}^{′}
5′

[0303] wherein:
[0304] i, j, k, and I are each independently 0 or 1;
[0305] p, p′, q, and q′ are each independently 0-6;
[0306] each Nₐ and Nₐ independently represents an oligonucleotide sequence comprising 0-25 modified nucleotides, each sequence comprising at least two differently modified nucleotides;
[0307] each N_{b} and N_{b} independently represents an oligonucleotide sequence comprising 0-10 modified nucleotides;
[0308] wherein each nₚ′, nₚ, nq′, and nq, each of which may or may not be present, independently represents an overhang nucleotide; and
[0309] XXX, YYY, ZZZ, X′X′X′, Y′Y′Y′, and Z′Z′Z′ each independently represent one motif of three identical modifications on three consecutive nucleotides.

[0310] In one embodiment, i is 0 and j is 0; or i is 1 and j is 0; or i is 0 and j is 1; or both i and j are 0; or both i and j are 1. In another embodiment, k is 0 and 1 is 0; or k is 1 and 1 is 0; k is 0 and 1 is 1; or both k and l are 0; or both k and I are 1.

[0311] Exemplary combinations of the sense strand and antisense strand forming a RNAi duplex include the formulas below:

5′ nₚ-Nₐ-Y Y Y-Nₐ-n_{q} 3′
3′ nₚ′-Nₐ′-Y′Y′Y′-Nₐ′n_{q}′ 5′
(IIIa)
5′ nₚ-Nₐ-Y Y Y-N_{b}-Z Z Z-Nₐ-n_{q} 3′
3′ nₚ′-Nₐ′-Y′Y′Y′-N_{b}′-Z′Z′Z′-Nₐ′n_{q}′ 5′
(IIIb)
5′ nₚ-Nₐ-X X X-N_{b}-Y Y Y-Nₐ-n_{q} 3′
3′ nₚ′-Nₐ′-X′X′X′-N_{b}′-Y′Y′Y′-Nₐ′-n_{q}′ 5′
(IIIc)
5′ nₚ-Nₐ-X X X-N_{b}-Y Y Y-N_{b}-Z Z Z-Nₐ-n_{q} 3′
3′ nₚ′-Nₐ′-X′X′X′-N_{b}′-Y′Y′Y′-N_{b}′-Z′Z′Z′-Nₐ-n_{q}′ 5′
(IIId)
5′-Nₐ-Y Y Y-N_{b}-3′
3′ nₚ′-Nₐ′-Y′Y′Y′-N_{b}′ 5′
(IIIe)

[0312] When the RNAi agent is represented by formula (IIIa), each Nₐ independently represents an oligonucleotide sequence comprising 2-20, 2-15, or 2-10 modified nucleotides.

[0313] When the RNAi agent is represented by formula (IIIb), each N_{b} independently represents an oligonucleotide sequence comprising 1-10, 1-7, 1-5 or 1-4 modified nucleotides. Each Nₐ independently represents an oligonucleotide sequence comprising 2-20, 2-15, or 2-10 modified nucleotides.

[0314] When the RNAi agent is represented as formula (IIIc), each N_{b}, No′ independently represents an oligonucleotide sequence comprising 0-10, 0-7, 0-10, 0-7, 0-5, 0-4, 0-2 or 0 modified nucleotides. Each Nₐ independently represents an oligonucleotide sequence comprising 2-20, 2-15, or 2-10 modified nucleotides.

[0315] When the RNAi agent is represented as formula (IIId), each N_{b}, N_{b}′ independently represents an oligonucleotide sequence comprising 0-10, 0-7, 0-10, 0-7, 0-5, 0-4, 0-2 or 0 modified nucleotides. Each Nₐ, Nₐ independently represents an oligonucleotide sequence comprising 2-20, 2-15, or 2-10 modified nucleotides. Each of Nₐ, Nₐ′, N_{b} and N_{b} independently comprises modifications of alternating pattern.

[0316] When the RNAi agent is represented as formula (IIIe), each Nₐ, Nₐ′, N_{b}, and N_{b}′ independently represents an oligonucleotide sequence comprising 0-25 nucleotides which are either modified or unmodified or combinations thereof, each sequence comprising at least two differently modified nucleotides.

[0317] Each of X, Y and Z in formulas (III), (IIIa), (IIIb), (IIIc), (IIId), and (IIIe) may be the same or different from each other.

[0318] When the RNAi agent is represented by formula (III), (IIIa), (IIIb), (IIIc), (IIId), and (IIIe), at least one of the Y nucleotides may form a base pair with one of the Y′ nucleotides. Alternatively, at least two of the Y nucleotides form base pairs with the corresponding Y′ nucleotides; or all three of the Y nucleotides all form base pairs with the corresponding Y′ nucleotides.

[0319] When the RNAi agent is represented by formula (IIIb) or (IIId), at least one of the Z nucleotides may form a base pair with one of the Z′ nucleotides. Alternatively, at least two of the Z nucleotides form base pairs with the corresponding Z′ nucleotides; or all three of the Z nucleotides all form base pairs with the corresponding Z′ nucleotides.

[0320] When the RNAi agent is represented as formula (IIIc) or (IIId), at least one of the X nucleotides may form a base pair with one of the X′ nucleotides. Alternatively, at least two of the X nucleotides form base pairs with the corresponding X′ nucleotides; or all three of the X nucleotides all form base pairs with the corresponding X′ nucleotides.

[0321] In one embodiment, the modification on the Y nucleotide is different than the modification on the Y′ nucleotide, the modification on the Z nucleotide is different than the modification on the Z′ nucleotide, and/or the modification on the X nucleotide is different than the modification on the X′ nucleotide.

[0322] In one embodiment, when the RNAi agent is represented by formula (IIId), the Nₐ modifications are 2′-O-methyl or 2′-fluoro modifications. In another embodiment, when the RNAi agent is represented by formula (IIId), the Nₐ modifications are 2′-O-methyl or 2′-fluoro modifications and nₚ′>0 and at least one nₚ′ is linked to a neighboring nucleotide a via phosphorothioate linkage. In yet another embodiment, when the RNAi agent is represented by formula (IIId), the Nₐ modifications are 2′-O-methyl or 2′-fluoro modifications, nₚ′>0 and at least one nₚ′ is linked to a neighboring nucleotide via phosphorothioate linkage, and the sense strand is conjugated to one or more GalNAc derivatives attached through a bivalent or trivalent branched linker (described below). In another embodiment, when the RNAi agent is represented by formula (IIId), the Nₐ modifications are 2′-O-methyl or 2′-fluoro modifications, nₚ′>0 and at least one nₚ′ is linked to a neighboring nucleotide via phosphorothioate linkage, the sense strand comprises at least one phosphorothioate linkage, and the sense strand is conjugated to one or more GalNAc derivatives attached through a bivalent or trivalent branched linker.

[0323] In one embodiment, when the RNAi agent is represented by formula (IIIa), the Nₐ modifications are 2′-O-methyl or 2′-fluoro modifications, nₚ′>0 and at least one nₚ′ is linked to a neighboring nucleotide via phosphorothioate linkage, the sense strand comprises at least one phosphorothioate linkage, and the sense strand is conjugated to one or more GalNAc derivatives attached through a bivalent or trivalent branched linker.

[0324] In one embodiment, two RNAi agents represented by formula (III), (IIIa), (IIIb), (IIIc), (IIId), and (IIIe) are linked to each other at the 5′ end, and one or both of the 3′ ends and are optionally conjugated to a ligand. Each of the agents can target the same gene or two different genes; or each of the agents can target same gene at two different target sites.

[0325] Various publications describe multimeric RNAi agents that can be used in the methods of the invention. Such publications include WO2007/091269, U.S. Pat. No. 7,858,769, WO2010/141511, WO2007/117686, WO2009/014887 and WO2011/031520 the entire contents of each of which are hereby incorporated herein by reference.

[0326] As described in more detail below, the RNAi agent that contains conjugations of one or more carbohydrate moieties to a RNAi agent can optimize one or more properties of the RNAi agent. In many cases, the carbohydrate moiety will be attached to a modified subunit of the RNAi agent. For example, the ribose sugar of one or more ribonucleotide subunits of a dsRNA agent can be replaced with another moiety, e.g., a non-carbohydrate (preferably cyclic) carrier to which is attached a carbohydrate ligand. A ribonucleotide subunit in which the ribose sugar of the subunit has been so replaced is referred to herein as a ribose replacement modification subunit (RRMS). A cyclic carrier may be a carbocyclic ring system, i.e., all ring atoms are carbon atoms, or a heterocyclic ring system, i.e., one or more ring atoms may be a heteroatom, e.g., nitrogen, oxygen, sulfur. The cyclic carrier may be a monocyclic ring system, or may contain two or more rings, e.g. fused rings. The cyclic carrier may be a fully saturated ring system, or it may contain one or more double bonds.

[0327] The ligand may be attached to the polynucleotide via a carrier. The carriers include (i) at least one “backbone attachment point,” preferably two “backbone attachment points” and (ii) at least one “tethering attachment point.” A “backbone attachment point” as used herein refers to a functional group, e.g. a hydroxyl group, or generally, a bond available for, and that is suitable for incorporation of the carrier into the backbone, e.g., the phosphate, or modified phosphate, e.g., sulfur containing, backbone, of a ribonucleic acid. A “tethering attachment point” (TAP) in some embodiments refers to a constituent ring atom of the cyclic carrier, e.g., a carbon atom or a heteroatom (distinct from an atom which provides a backbone attachment point), that connects a selected moiety. The moiety can be, e.g., a carbohydrate, e.g. monosaccharide, disaccharide, trisaccharide, tetrasaccharide, oligosaccharide and polysaccharide. Optionally, the selected moiety is connected by an intervening tether to the cyclic carrier. Thus, the cyclic carrier will often include a functional group, e.g., an amino group, or generally, provide a bond, that is suitable for incorporation or tethering of another chemical entity, e.g., a ligand to the constituent ring.

[0328] The RNAi agents may be conjugated to a ligand via a carrier, wherein the carrier can be cyclic group or acyclic group; preferably, the cyclic group is selected from pyrrolidinyl, pyrazolinyl, pyrazolidinyl, imidazolinyl, imidazolidinyl, piperidinyl, piperazinyl, [1,3]dioxolane, oxazolidinyl, isoxazolidinyl, morpholinyl, thiazolidinyl, isothiazolidinyl, quinoxalinyl, pyridazinonyl, tetrahydrofuryl and decalin; preferably, the acyclic group is selected from serinol backbone or diethanolamine backbone.

[0329] In certain specific embodiments, the RNAi agent, e.g., for use in the methods of the invention, is an agent selected from the group of agents listed in any one of Tables 1, 3, 5, 6, and 7. These agents may further comprise a ligand.

[0330] In certain embodiments, the RNAi agent of the invention is an agent selected from the group consisting of AD-66016, AD-65492, AD-66017, and AD-66018.

### IV. RNAs Conjugated to Ligands

[0331] Another modification of the RNA of an iRNA of the invention involves chemically linking to the RNA one or more ligands, moieties or conjugates that enhance the activity, cellular distribution or cellular uptake of the iRNA. Such moieties include but are not limited to lipid moieties such as a cholesterol moiety (Letsinger et al., Proc. Natl. Acid. Sci. USA, 1989, 86:6553-6556), cholic acid (Manoharan et al., Biorg. Med. Chem. Let., 1994, 4:1053-1060), a thioether, e.g., beryl-S-tritylthiol (Manoharan et al., Ann. N.Y. Acad. Sci., 1992, 660:306-309; Manoharan et al., Biorg. Med. Chem. Let., 1993, 3:2765-2770), a thiocholesterol (Oberhauser et al., Nucl. Acids Res., 1992, 20:533-538), an aliphatic chain, e.g., dodecandiol or undecyl residues (Saison-Behmoaras et al., EMBO J, 1991, 10:1111-1118; Kabanov et al., FEBS Lett., 1990, 259:327-330; Svinarchuk et al., Biochimie, 1993, 75:49-54), a phospholipid, e.g., di-hexadecyl-rac-glycerol or triethyl-ammonium 1,2-di-O-hexadecyl-rac-glycero-3-phosphonate (Manoharan et al., Tetrahedron Lett., 1995, 36:3651-3654; Shea et al., Nucl. Acids Res., 1990, 18:3777-3783), a polyamine or a polyethylene glycol chain (Manoharan et al., Nucleosides & Nucleotides, 1995, 14:969-973), or adamantane acetic acid (Manoharan et al., Tetrahedron Lett., 1995, 36:3651-3654), a palmityl moiety (Mishra et al., Biochim. Biophys. Acta, 1995, 1264:229-237), or an octadecylamine or hexylamino-carbonyloxycholesterol moiety (Crooke et al., J. Pharmacol. Exp. Ther., 1996, 277:923-937).

[0332] In one embodiment, a ligand alters the distribution, targeting or lifetime of an iRNA agent into which it is incorporated. In preferred embodiments a ligand provides an enhanced affinity for a selected target, e.g., molecule, cell or cell type, compartment, e.g., a cellular or organ compartment, tissue, organ or region of the body, as, e.g., compared to a species absent such a ligand. Preferred ligands will not take part in duplex pairing in a duplexed nucleic acid.

[0333] Ligands can include a naturally occurring substance, such as a protein (e.g., human serum albumin (HSA), low-density lipoprotein (LDL), or globulin); carbohydrate (e.g., a dextran, pullulan, chitin, chitosan, inulin, cyclodextrin, N-acetylgalactosamine, or hyaluronic acid); or a lipid. The ligand can also be a recombinant or synthetic molecule, such as a synthetic polymer, e.g., a synthetic polyamino acid. Examples of polyamino acids include polyamino acid is a polylysine (PLL), poly L-aspartic acid, poly L-glutamic acid, styrene-maleic acid anhydride copolymer, poly(L-lactide-co-glycolicd) copolymer, divinyl ether-maleic anhydride copolymer, N-(2-hydroxypropyl) methacrylamide copolymer (HMPA), polyethylene glycol (PEG), polyvinyl alcohol (PVA), polyurethane, poly(2-ethylacryllic acid), N-isopropylacrylamide polymers, or polyphosphazine. Example of polyamines include: polyethylenimine, polylysine (PLL), spermine, spermidine, polyamine, pseudopeptide-polyamine, peptidomimetic polyamine, dendrimer polyamine, arginine, amidine, protamine, cationic lipid, cationic porphyrin, quaternary salt of a polyamine, or an alpha helical peptide.

[0334] Ligands can also include targeting groups, e.g., a cell or tissue targeting agent, e.g., a lectin, glycoprotein, lipid or protein, e.g., an antibody, that binds to a specified cell type such as a kidney cell. A targeting group can be a thyrotropin, melanotropin, lectin, glycoprotein, surfactant protein A, Mucin carbohydrate, multivalent lactose, monovalent galactose, N-acetyl-galactosamine, N-acetyl-gulucoseamine multivalent mannose, multivalent fucose, glycosylated polyaminoacids, multivalent galactose, transferrin, bisphosphonate, polyglutamate, polyaspartate, a lipid, cholesterol, a steroid, bile acid, folate, vitamin B12, vitamin A, biotin, or an RGD peptide or RGD peptide mimetic. In certain embodiments, ligands include monovalent or multivalent galactose. In certain embodiments, ligands include cholesterol.

[0335] Other examples of ligands include dyes, intercalating agents (e.g. acridincs), cross-linkers (e.g. psoralene, mitomycin C), porphyrins (TPPC4, texaphyrin, Sapphyrin), polycyclic aromatic hydrocarbons (e.g., phenazine, dihydrophenazine), artificial endonucleases (e.g. EDTA), lipophilic molecules, e.g., cholesterol, cholic acid, adamantane acetic acid, 1-pyrene butyric acid, dihydrotestosterone, 1,3-Bis-O(hexadecyl) glycerol, geranyloxyhexyl group, hexadecylglycerol, borneol, menthol, 1,3-propanediol, heptadecyl group, palmitic acid, myristic acid,O3-(oleoyl) lithocholic acid, O3-(oleoyl) cholenic acid, dimethoxytrityl, or phenoxazine) and peptide conjugates (e.g., antennapedia peptide, Tat peptide), alkylating agents, phosphate, amino, mercapto, PEG (e.g., PEG-40K), MPEG, [MPEG]₂, polyamino, alkyl, substituted alkyl, radiolabeled markers, enzymes, haptens (e.g. biotin), transport/absorption facilitators (e.g., aspirin, vitamin E, folic acid), synthetic ribonucleases (e.g., imidazole, bisimidazole, histamine, imidazole clusters, acridine-imidazole conjugates, Eu3+ complexes of tetraazamacrocycles), dinitrophenyl, HRP, or AP.

[0336] Ligands can be proteins, e.g., glycoproteins, or peptides, e.g., molecules having a specific affinity for a co-ligand, or antibodies e.g., an antibody, that binds to a specified cell type such as a hepatic cell. Ligands can also include hormones and hormone receptors. They can also include non-peptidic species, such as lipids, lectins, carbohydrates, vitamins, cofactors, multivalent lactose, multivalent galactose, N-acetyl-galactosamine, N-acetyl-gulucosamine multivalent mannose, or multivalent fucose. The ligand can be, for example, a lipopolysaccharide, an activator of p38 MAP kinase, or an activator of NF-κB.

[0337] The ligand can be a substance, e.g., a drug, which can increase the uptake of the iRNA agent into the cell, for example, by disrupting the cell's cytoskeleton, e.g., by disrupting the cell's microtubules, microfilaments, and/or intermediate filaments. The drug can be, for example, taxon, vincristine, vinblastine, cytochalasin, nocodazole, japlakinolide, latrunculin A, phalloidin, swinholide A, indanocine, or myoservin.

[0338] In some embodiments, a ligand attached to an iRNA as described herein acts as a pharmacokinetic modulator (PK modulator). PK modulators include lipophiles, bilc acids, steroids, phospholipid analogues, peptides, protein binding agents, PEG, vitamins etc. Exemplary PK modulators include, but are not limited to, cholesterol, fatty acids, cholic acid, lithocholic acid, dialkylglycerides, diacylglyceride, phospholipids, sphingolipids, naproxen, ibuprofen, vitamin E, biotin etc. Oligonucleotides that comprise a number of phosphorothioate linkages are also known to bind to serum protein, thus short oligonucleotides, e.g., oligonucleotides of about 5 bases, 10 bases, 15 bases or 20 bases, comprising multiple of phosphorothioate linkages in the backbone are also amenable to the present invention as ligands (e.g. as PK modulating ligands). In addition, aptamers that bind serum components (e.g. serum proteins) are also suitable for use as PK modulating ligands in the embodiments described herein.

[0339] Ligand-conjugated oligonucleotides of the invention may be synthesized by the use of an oligonucleotide that bears a pendant reactive functionality, such as that derived from the attachment of a linking molecule onto the oligonucleotide (described below). This reactive oligonucleotide may be reacted directly with commercially-available ligands, ligands that are synthesized bearing any of a variety of protecting groups, or ligands that have a linking moiety attached thereto.

[0340] The oligonucleotides used in the conjugates of the present invention may be conveniently and routinely made through the well-known technique of solid-phase synthesis. Equipment for such synthesis is sold by several vendors including, for example, Applied Biosystems (Foster City, Calif.). Any other means for such synthesis known in the art may additionally or alternatively be employed. It is also known to use similar techniques to prepare other oligonucleotides, such as the phosphorothioates and alkylated derivatives.

[0341] In the ligand-conjugated oligonucleotides and ligand-molecule bearing sequence-specific linked nucleosides of the present invention, the oligonucleotides and oligonucleosides may be assembled on a suitable DNA synthesizer utilizing standard nucleotide or nucleoside precursors, or nucleotide or nucleoside conjugate precursors that already bear the linking moiety, ligand-nucleotide or nucleoside-conjugate precursors that already bear the ligand molecule, or non-nucleoside ligand-bearing building blocks.

[0342] When using nucleotide-conjugate precursors that already bear a linking moiety, the synthesis of the sequence-specific linked nucleosides is typically completed, and the ligand molecule is then reacted with the linking moiety to form the ligand-conjugated oligonucleotide. In some embodiments, the oligonucleotides or linked nucleosides of the present invention are synthesized by an automated synthesizer using phosphoramidites derived from ligand-nucleoside conjugates in addition to the standard phosphoramidites and non-standard phosphoramidites that are commercially available and routinely used in oligonucleotide synthesis.

### A. Lipid Conjugates

[0343] In one embodiment, the ligand or conjugate is a lipid or lipid-based molecule. Such a lipid or lipid-based molecule preferably binds a serum protein, e.g., human serum albumin (HSA). An HSA binding ligand allows for distribution of the conjugate to a target tissue, e.g., a non-kidney target tissue of the body. For example, the target tissue can be the liver, including parenchymal cells of the liver. Other molecules that can bind HSA can also be used as ligands. For example, naproxen or aspirin can be used. A lipid or lipid-based ligand can (a) increase resistance to degradation of the conjugate, (b) increase targeting or transport into a target cell or cell membrane, and/or (c) can be used to adjust binding to a serum protein, e.g., HSA.

[0344] A lipid based ligand can be used to inhibit, e.g., control the binding of the conjugate to a target tissue. For example, a lipid or lipid-based ligand that binds to HSA more strongly will be less likely to be targeted to the kidney and therefore less likely to be cleared from the body. A lipid or lipid-based ligand that binds to HSA less strongly can be used to target the conjugate to the kidney.

[0345] In a preferred embodiment, the lipid based ligand binds HSA. Preferably, it binds HSA with a sufficient affinity such that the conjugate will be preferably distributed to a non-kidney tissue. However, it is preferred that the affinity not be so strong that the HSA-ligand binding cannot be reversed.

[0346] In another preferred embodiment, the lipid based ligand binds HSA weakly or not at all, such that the conjugate will be preferably distributed to the kidney. Other moieties that target to kidney cells can also be used in place of or in addition to the lipid based ligand.

[0347] In another aspect, the ligand is a moiety, e.g., a vitamin, which is taken up by a target cell, e.g., a proliferating cell. These are particularly useful for treating disorders characterized by unwanted cell proliferation, e.g., of the malignant or non-malignant type, e.g., cancer cells. Exemplary vitamins include vitamin A, E, and K. Other exemplary vitamins include are B vitamin, e.g., folic acid, B12, riboflavin, biotin, pyridoxal or other vitamins or nutrients taken up by target cells such as liver cells. Also included are HSA and low density lipoprotein (LDL).

### B. Cell Permeation Agents

[0348] In another aspect, the ligand is a cell-permeation agent, preferably a helical cell-permeation agent. Preferably, the agent is amphipathic. An exemplary agent is a peptide such as tat or antennopedia. If the agent is a peptide, it can be modified, including a peptidylmimetic, invertomers, non-peptide or pseudo-peptide linkages, and use of D-amino acids. The helical agent is preferably an alpha-helical agent, which preferably has a lipophilic and a lipophobic phase.

[0349] The ligand can be a peptide or peptidomimetic. A peptidomimetic (also referred to herein as an oligopeptidomimetic) is a molecule capable of folding into a defined three-dimensional structure similar to a natural peptide. The attachment of peptide and peptidomimetics to iRNA agents can affect pharmacokinetic distribution of the iRNA, such as by enhancing cellular recognition and absorption. The peptide or peptidomimetic moiety can be about 5-50 amino acids long, e.g., about 5, 10, 15, 20, 25, 30, 35, 40, 45, or 50 amino acids long.

[0350] A peptide or peptidomimetic can be, for example, a cell permeation peptide, cationic peptide, amphipathic peptide, or hydrophobic peptide (e.g., consisting primarily of Tyr, Trp or Phe). The peptide moiety can be a dendrimer peptide, constrained peptide or crosslinked peptide. In another alternative, the peptide moiety can include a hydrophobic membrane translocation sequence (MTS). An exemplary hydrophobic MTS-containing peptide is RFGF having the amino acid sequence AAVALLPAVLLALLAP (SEQ ID NO: 11). An RFGF analogue (e.g., amino acid sequence AALLPVLLAAP (SEQ ID NO: 12) containing a hydrophobic MTS can also be a targeting moiety. The peptide moiety can be a “delivery” peptide, which can carry large polar molecules including peptides, oligonucleotides, and protein across cell membranes. For example, sequences from the HIV Tat protein (GRKKRRQRRRPPQ) (SEQ ID NO: 13) and the Drosophila Antennapedia protein (RQIKIWFQNRRMKWKK) (SEQ ID NO: 14) have been found to be capable of functioning as delivery peptides. A peptide or peptidomimetic can be encoded by a random sequence of DNA, such as a peptide identified from a phage-display library, or one-bead-one-compound (OBOC) combinatorial library (Lam et al., Nature, 354:82-84, 1991). Examples of a peptide or peptidomimetic tethered to a dsRNA agent via an incorporated monomer unit for cell targeting purposes is an arginine-glycine-aspartic acid (RGD)-peptide, or RGD mimic. A peptide moiety can range in length from about 5 amino acids to about 40 amino acids. The peptide moieties can have a structural modification, such as to increase stability or direct conformational properties. Any of the structural modifications described below can be utilized.

[0351] An RGD peptide for use in the compositions and methods of the invention may be linear or cyclic, and may be modified, e.g., glycosylated or methylated, to facilitate targeting to a specific tissue(s). RGD-containing peptides and peptidiomimemtics may include D-amino acids, as well as synthetic RGD mimics. In addition to RGD, one can use other moieties that target the integrin ligand. Preferred conjugates of this ligand target PECAM-1 or VEGF.

[0352] A “cell permeation peptide” is capable of permeating a cell, e.g., a microbial cell, such as a bacterial or fungal cell, or a mammalian cell, such as a human cell. A microbial cell-permeating peptide can be, for example, an α-helical linear peptide (e.g., LL-37 or Ceropin P1), a disulfide bond-containing peptide (e.g., α-defensin, β-defensin or bactenecin), or a peptide containing only one or two dominating amino acids (e.g., PR-39 or indolicidin). A cell permeation peptide can also include a nuclear localization signal (NLS). For example, a cell permeation peptide can be a bipartite amphipathic peptide, such as MPG, which is derived from the fusion peptide domain of HIV-1 gp41 and the NLS of SV40 large T antigen (Simeoni et al., Nucl. Acids Res. 31:2717-2724, 2003).

### C. Carbohydrate Conjugates

[0353] In some embodiments of the compositions and methods of the invention, an iRNA oligonucleotide further comprises a carbohydrate. The carbohydrate conjugated iRNA are advantageous for the in vivo delivery of nucleic acids, as well as compositions suitable for in vivo therapeutic use, as described herein. As used herein, “carbohydrate” refers to a compound which is either a carbohydrate per se made up of one or more monosaccharide units having at least 6 carbon atoms (which can be linear, branched or cyclic) with an oxygen, nitrogen or sulfur atom bonded to each carbon atom; or a compound having as a part thereof a carbohydrate moiety made up of one or more monosaccharide units each having at least six carbon atoms (which can be linear, branched or cyclic), with an oxygen, nitrogen or sulfur atom bonded to each carbon atom. Representative carbohydrates include the sugars (mono-, di-, tri- and oligosaccharides containing from about 4, 5, 6, 7, 8, or 9 monosaccharide units), and polysaccharides such as starches, glycogen, cellulose and polysaccharide gums. Specific monosaccharides include TTR and above (e.g., TTR, C6, C7, or C8) sugars; di- and trisaccharides include sugars having two or three monosaccharide units (e.g., TTR, C6, C7, or C8).

[0354] In one embodiment, a carbohydrate conjugate for use in the compositions and methods of the invention is a monosaccharide. In another embodiment, a carbohydrate conjugate for use in the compositions and methods of the invention is selected from the group consisting of:

[chemical structure]

[chemical structure]

[chemical structure]

[chemical structure]

[chemical structure]

[0355] In one embodiment, the monosaccharide is an N-acetylgalactosamine, such as

[chemical structure]

[0356] Another representative carbohydrate conjugate for use in the embodiments described herein includes, but is not limited to,

[chemical structure]

[0357] when one of X or Y is an oligonucleotide, the other is a hydrogen.

[0358] In certain embodiments of the invention, the GalNAc or GalNAc derivative is attached to an iRNA agent of the invention via a monovalent linker. In some embodiments, the GalNAc or GalNAc derivative is attached to an iRNA agent of the invention via a bivalent linker. In yet other embodiments of the invention, the GalNAc or GalNAc derivative is attached to an iRNA agent of the invention via a trivalent linker.

[0359] In one embodiment, the double stranded RNAi agents of the invention comprise one GalNAc or GalNAc derivative attached to the iRNA agent. In another embodiment, the double stranded RNAi agents of the invention comprise a plurality (e.g., 2, 3, 4, 5, or 6) GalNAc or GalNAc derivatives, each independently attached to a plurality of nucleotides of the double stranded RNAi agent through a plurality of monovalent linkers.

[0360] In some embodiments, for example, when the two strands of an iRNA agent of the invention are part of one larger molecule connected by an uninterrupted chain of nucleotides between the 3′-end of one strand and the 5′-end of the respective other strand forming a hairpin loop comprising, a plurality of unpaired nucleotides, each unpaired nucleotide within the hairpin loop may independently comprise a GalNAc or GalNAc derivative attached via a monovalent linker. The hairpin loop may also be formed by an extended overhang in one strand of the duplex.

[0361] In some embodiments, the carbohydrate conjugate further comprises one or more additional ligands as described above, such as, but not limited to, a PK modulator and/or a cell permeation peptide.

[0362] Additional carbohydrate conjugates suitable for use in the present invention include those described in PCT Publication Nos. WO 2014/179620 and WO 2014/179627, the entire contents of each of which are incorporated herein by reference.

### D. Linkers

[0363] In some embodiments, the conjugate or ligand described herein can be attached to an iRNA oligonucleotide with various linkers that can be cleavable or non-cleavable.

[0364] The term “linker” or “linking group” means an organic moiety that connects two parts of a compound, e.g., covalently attaches two parts of a compound. Linkers typically comprise a direct bond or an atom such as oxygen or sulfur, a unit such as NR8, C(O), C(O)NH, SO, SO₂, SO₂NH or a chain of atoms, such as, but not limited to, substituted or unsubstituted alkyl, substituted or unsubstituted alkenyl, substituted or unsubstituted alkynyl, arylalkyl, arylalkenyl, arylalkynyl, heteroarylalkyl, heteroarylalkenyl, heteroarylalkynyl, heterocyclylalkyl, heterocyclylalkenyl, heterocyclylalkynyl, aryl, heteroaryl, heterocyclyl, cycloalkyl, cycloalkenyl, alkylarylalkyl, alkylarylalkenyl, alkylarylalkynyl, alkenylarylalkyl, alkenylarylalkenyl, alkenylarylalkynyl, alkynylarylalkyl, alkynylarylalkenyl, alkynylarylalkynyl, alkylheteroarylalkyl, alkylheteroarylalkenyl, alkylheteroarylalkynyl, alkenylheteroarylalkyl, alkenylheteroarylalkenyl, alkenylheteroarylalkynyl, alkynylheteroarylalkyl, alkynylheteroarylalkenyl, alkynylheteroarylalkynyl, alkylheterocyclylalkyl, alkylheterocyclylalkenyl, alkylhererocyclylalkynyl, alkenylheterocyclylalkyl, alkenylheterocyclylalkenyl, alkenylheterocyclylalkynyl, alkynylheterocyclylalkyl, alkynylheterocyclylalkenyl, alkynylheterocyclylalkynyl, alkylaryl, alkenylaryl, alkynylaryl, alkylheteroaryl, alkenylheteroaryl, alkynylhereroaryl, which one or more methylenes can be interrupted or terminated by O, S, S(O), SO₂, N (R8), C(O), substituted or unsubstituted aryl, substituted or unsubstituted heteroaryl, substituted or unsubstituted heterocyclic; where R8 is hydrogen, acyl, aliphatic or substituted aliphatic. In one embodiment, the linker is between about 1-24 atoms, 2-24, 3-24, 4-24, 5-24, 6-24, 6-18, 7-18, 8-18 atoms, 7-17, 8-17, 6-16, 7-16, or 8-16 atoms.

[0365] A cleavable linking group is one which is sufficiently stable outside the cell, but which upon entry into a target cell is cleaved to release the two parts the linker is holding together. In a preferred embodiment, the cleavable linking group is cleaved at least about 10 times, 20, times, 30 times, 40 times, 50 times, 60 times, 70 times, 80 times, 90 times or more, or at least about 100 times faster in a target cell or under a first reference condition (which can, e.g., be selected to mimic or represent intracellular conditions) than in the blood of a subject, or under a second reference condition (which can, e.g., be selected to mimic or represent conditions found in the blood or serum).

[0366] Cleavable linking groups are susceptible to cleavage agents, e.g., pH, redox potential or the presence of degradative molecules. Generally, cleavage agents are more prevalent or found at higher levels or activities inside cells than in serum or blood. Examples of such degradative agents include: redox agents which are selected for particular substrates or which have no substrate specificity, including, e.g., oxidative or reductive enzymes or reductive agents such as mercaptans, present in cells, that can degrade a redox cleavable linking group by reduction; esterases; endosomes or agents that can create an acidic environment, e.g., those that result in a pH of five or lower; enzymes that can hydrolyze or degrade an acid cleavable linking group by acting as a general acid, peptidases (which can be substrate specific), and phosphatases.

[0367] A cleavable linkage group, such as a disulfide bond can be susceptible to pH. The pH of human serum is 7.4, while the average intracellular pH is slightly lower, ranging from about 7.1-7.3. Endosomes have a more acidic pH, in the range of 5.5-6.0, and lysosomes have an even more acidic pH at around 5.0. Some linkers will have a cleavable linking group that is cleaved at a preferred pH, thereby releasing a cationic lipid from the ligand inside the cell, or into the desired compartment of the cell.

[0368] A linker can include a clavable linking group that is cleavable by a particular enzyme. The type of cleavable linking group incorporated into a linker can depend on the cell to be targeted. For example, a liver-targeting ligand can be linked to a cationic lipid through a linker that includes an ester group. Liver cells are rich in esterases, and therefore the linker will be cleaved more efficiently in liver cells than in cell types that are not esterase-rich. Other cell-types rich in esterases include cells of the lung, renal cortex, and testis.

[0369] Linkers that contain peptide bonds can be used when targeting cell types rich in peptidases, such as liver cells and synoviocytes.

[0370] In general, the suitability of a candidate cleavable linking group can be evaluated by testing the ability of a degradative agent (or condition) to cleave the candidate linking group. It will also be desirable to also test the candidate cleavable linking group for the ability to resist cleavage in the blood or when in contact with other non-target tissue. Thus, one can determine the relative susceptibility to cleavage between a first and a second condition, where the first is selected to be indicative of cleavage in a target cell and the second is selected to be indicative of cleavage in other tissues or biological fluids, e.g., blood or serum. The evaluations can be carried out in cell free systems, in cells, in cell culture, in organ or tissue culture, or in whole animals. It can be useful to make initial evaluations in cell-free or culture conditions and to confirm by further evaluations in whole animals. In preferred embodiments, useful candidate compounds are cleaved at least about 2, 4, 10, 20, 30, 40, 50, 60, 70, 80, 90, or about 100 times faster in the cell (or under in vitro conditions selected to mimic intracellular conditions) as compared to blood or serum (or under in vitro conditions selected to mimic extracellular conditions).

i. Redox Cleavable Linking Groups

[0371] In one embodiment, a cleavable linking group is a redox cleavable linking group that is cleaved upon reduction or oxidation. An example of reductively cleavable linking group is a disulphide linking group (—S—S—). To determine if a candidate cleavable linking group is a suitable “reductively cleavable linking group,” or for example is suitable for use with a particular iRNA moiety and particular targeting agent one can look to methods described herein. For example, a candidate can be evaluated by incubation with dithiothreitol (DTT), or other reducing agent using reagents know in the art, which mimic the rate of cleavage which would be observed in a cell, e.g., a target cell. The candidates can also be evaluated under conditions which are selected to mimic blood or serum conditions. In one, candidate compounds are cleaved by at most about 10% in the blood. In other embodiments, useful candidate compounds are degraded at least about 2, 4, 10, 20, 30, 40, 50, 60, 70, 80, 90, or about 100 times faster in the cell (or under in vitro conditions selected to mimic intracellular conditions) as compared to blood (or under in vitro conditions selected to mimic extracellular conditions). The rate of cleavage of candidate compounds can be determined using standard enzyme kinetics assays under conditions chosen to mimic intracellular media and compared to conditions chosen to mimic extracellular media.

ii. Phosphate-Based Cleavable Linking Groups

[0372] In another embodiment, a cleavable linker comprises a phosphate-based cleavable linking group. A phosphate-based cleavable linking group is cleaved by agents that degrade or hydrolyze the phosphate group. An example of an agent that cleaves phosphate groups in cells are enzymes such as phosphatases in cells. Examples of phosphate-based linking groups are —O—P(O)(ORk)-O—, —O—P(S)(ORk)-O—, —O—P(S)(SRk)-O—, —S—P(O)(ORk)-O—, —O—P(O)(ORk)-S—, —S—P(O)(ORk)-S—, —O—P(S)(ORk)-S—, —S—P(S)(ORk)-O—, —O—P(O)(Rk)-O—, —O—P(S)(Rk)-O—, —S—P(O)(Rk)-O—, —S—P(S)(Rk)-O—, —S—P(O)(Rk)-S—, —O—P(S)(Rk)-S—. Preferred embodiments are —O—P(O)(OH)—O—, —O—P(S)(OH)—O—, —O—P(S)(SH)—O—, —S—P(O)(OH)—O—, —O—P(O)(OH)—S—, —S—P(O)(OH)—S—, —O—P(S)(OH)—S—, —S—P(S)(OH)—O—, —O—P(O)(H)—O—, —O—P(S)(H)—O—, —S—P(O)(H)—O, —S—P(S)(H)—O—, —S—P(O)(H)—S—, —O—P(S)(H)—S—. A preferred embodiment is-O—P(O)(OH)—O—. These candidates can be evaluated using methods analogous to those described above.

iii. Acid Cleavable Linking Groups

[0373] In another embodiment, a cleavable linker comprises an acid cleavable linking group. An acid cleavable linking group is a linking group that is cleaved under acidic conditions. In preferred embodiments acid cleavable linking groups are cleaved in an acidic environment with a pH of about 6.5 or lower (e.g., about 6.0, 5.75, 5.5, 5.25, 5.0, or lower), or by agents such as enzymes that can act as a general acid. In a cell, specific low pH organelles, such as endosomes and lysosomes can provide a cleaving environment for acid cleavable linking groups. Examples of acid cleavable linking groups include but are not limited to hydrazones, esters, and esters of amino acids. Acid cleavable groups can have the general formula —C═NN—, C(O)O, or —OC(O). A preferred embodiment is when the carbon attached to the oxygen of the ester (the alkoxy group) is an aryl group, substituted alkyl group, or tertiary alkyl group such as dimethyl pentyl or t-butyl. These candidates can be evaluated using methods analogous to those described above.

iv. Ester-Based Linking Groups

[0374] In another embodiment, a cleavable linker comprises an ester-based cleavable linking group. An ester-based cleavable linking group is cleaved by enzymes such as esterases and amidases in cells. Examples of ester-based cleavable linking groups include but are not limited to esters of alkylene, alkenylene and alkynylene groups. Ester cleavable linking groups have the general formula —C(O)O—, or —OC(O)—. These candidates can be evaluated using methods analogous to those described above.

v. Peptide-Based Cleaving Groups

[0375] In yet another embodiment, a cleavable linker comprises a peptide-based cleavable linking group. A peptide-based cleavable linking group is cleaved by enzymes such as peptidases and proteases in cells. Peptide-based cleavable linking groups are peptide bonds formed between amino acids to yield oligopeptides (e.g., dipeptides, tripeptides etc.) and polypeptides. Peptide-based cleavable groups do not include the amide group (—C(O) NH—). The amide group can be formed between any alkylene, alkenylene or alkynelene. A peptide bond is a special type of amide bond formed between amino acids to yield peptides and proteins. The peptide based cleavage group is generally limited to the peptide bond (i.e., the amide bond) formed between amino acids yielding peptides and proteins and does not include the entire amide functional group. Peptide-based cleavable linking groups have the general formula —NHCHRAC(O)NHCHRBC(O)—, where RA and RB are the R groups of the two adjacent amino acids. These candidates can be evaluated using methods analogous to those described above.

[0376] In one embodiment, an iRNA of the invention is conjugated to a carbohydrate through a linker. Non-limiting examples of iRNA carbohydrate conjugates with linkers of the compositions and methods of the invention include, but are not limited to.

[chemical structure]

[chemical structure]

[chemical structure]

[0377] when one of X or Y is an oligonucleotide, the other is a hydrogen.

[0378] In certain embodiments of the compositions and methods of the invention, a ligand is one or more “GalNAc” (N-acetylgalactosamine) derivatives attached through a bivalent or trivalent branched linker.

[0379] In one embodiment, a dsRNA of the invention is conjugated to a bivalent or trivalent branched linker selected from the group of structures shown in any of formula (XXXII)-(XXXV):

[chemical structure]

[0380] wherein:
[0381] q2A, q2B, q3A, q3B, q4A, q4B, q5A, q5B and q5C represent independently for each occurrence q2A, q2B, q3A, q3B, q4A, q4B, q5A, q5B and q5C represent independently for each occurrence 0-20 and wherein the repeating unit can be the same or different;
[0382] P^{2A}, P^{2B}, P^{3A}, P^{3B}, P^{4A}, P^{4B}, P^{5A}, P^{5B}, P^{5C}, T^{2A}, T^{2B}, T^{3A}, T^{3B}, T^{4A}, T^{4B}, T^{4A}, T^{5B}, T^{5C} are each independently for each occurrence absent, CO, NH, O, S, OC(O), NHC(O), CH₂, CH₂NH or CH₂O;
[0383] Q^{2A}, Q^{2B}, Q^{3A}, Q^{3B}, Q^{4A}, Q^{4B}, Q^{5A}, Q^{5B}, Q^{5C} are independently for each occurrence absent, alkylene, substituted alkylene wherein one or more methylenes can be interrupted or terminated by one or more of O, S, S(O), SO₂, N(R^{N}), C(R′)═C(R″), C≡C or C(O);
[0384] R^{2A}, R^{2B}, R^{3A}, R^{3B}, R^{4A}, R^{4B}, R^{5A}, R^{5B}, R^{5C} are each independently for each occurrence absent, NH, O, S, CH₂, C(O)O, C(O)NH, NHCH(R^{a}) C(O), —C(O)—CH(R^{a})—NH—, CO,

[chemical structure]

or heterocyclyl;
[0385] L^{2A}, L^{2B}, L^{3A}, L^{3B}, L^{4A}, L^{4B}, L^{5A}, L^{5B} and L^{5C} represent the ligand; i.e. each independently for each occurrence a monosaccharide (such as GalNAc), disaccharide, trisaccharide, tetrasaccharide, oligosaccharide, or polysaccharide; and R^{a} is H or amino acid side chain. Trivalent conjugating GalNAc derivatives are particularly useful for use with RNAi agents for inhibiting the expression of a target gene, such as those of formula (XXXVI):

[chemical structure]

[0386] wherein L^{5A}, L^{5B} and L^{5C} represent a monosaccharide, such as GalNAc derivative.

[0387] Examples of suitable bivalent and trivalent branched linker groups conjugating GalNAc derivatives include, but are not limited to, the structures recited above as formulas II, VII, XI, X, and XIII.

[0388] Representative U.S. patents that teach the preparation of RNA conjugates include, but are not limited to, U.S. Pat. Nos. 4,828,979; 4,948,882; 5,218,105; 5,525,465; 5,541,313; 5,545,730; 5,552,538; 5,578,717, 5,580,731; 5,591,584; 5,109,124; 5,118,802; 5,138,045; 5,414,077; 5,486,603; 5,512,439; 5,578,718; 5,608,046; 4,587,044; 4,605,735; 4,667,025; 4,762,779; 4,789,737; 4,824,941; 4,835,263; 4,876,335; 4,904,582; 4,958,013; 5,082,830; 5,112,963; 5,214,136; 5,082,830; 5,112,963; 5,214,136; 5,245,022; 5,254,469; 5,258,506; 5,262,536; 5,272,250; 5,292,873; 5,317,098; 5,371,241, 5,391,723; 5,416,203, 5,451,463; 5,510,475; 5,512,667; 5,514,785; 5,565,552; 5,567,810; 5,574,142; 5,585,481; 5,587,371; 5,595,726; 5,597,696; 5,599,923; 5,599,928 and 5,688,941; 6,294,664; 6,320,017; 6,576,752; 6,783,931; 6,900,297; 7,037,646; 8,106,022, the entire contents of each of which are hereby incorporated herein by reference.

[0389] It is not necessary for all positions in a given compound to be uniformly modified, and in fact more than one of the aforementioned modifications can be incorporated in a single compound or even at a single nucleoside within an iRNA. The present invention also includes iRNA compounds that are chimeric compounds.

[0390] “Chimeric” iRNA compounds or “chimeras,” in the context of this invention, are iRNA compounds, preferably dsRNAs, which contain two or more chemically distinct regions, each made up of at least one monomer unit, i.e., a nucleotide in the case of a dsRNA compound. These iRNAs typically contain at least one region wherein the RNA is modified so as to confer upon the iRNA increased resistance to nuclease degradation, increased cellular uptake, and/or increased binding affinity for the target nucleic acid. An additional region of the iRNA can serve as a substrate for enzymes capable of cleaving RNA: DNA or RNA: RNA hybrids. By way of example, RNase H is a cellular endonuclease which cleaves the RNA strand of an RNA: DNA duplex. Activation of RNase H, therefore, results in cleavage of the RNA target, thereby greatly enhancing the efficiency of iRNA inhibition of gene expression. Consequently, comparable results can often be obtained with shorter iRNAs when chimeric dsRNAs are used, compared to phosphorothioate deoxy dsRNAs hybridizing to the same target region. Cleavage of the RNA target can be routinely detected by gel electrophoresis and, if necessary, associated nucleic acid hybridization techniques known in the art.

[0391] In certain instances, the RNA of an iRNA can be modified by a non-ligand group. A number of non-ligand molecules have been conjugated to iRNAs in order to enhance the activity, cellular distribution or cellular uptake of the iRNA, and procedures for performing such conjugations are available in the scientific literature. Such non-ligand moieties have included lipid moieties, such as cholesterol (Kubo, T. et al., Biochem. Biophys. Res. Comm., 2007, 365 (1): 54-61; Letsinger et al., Proc. Natl. Acad. Sci. USA, 1989, 86:6553), cholic acid (Manoharan et al., Bioorg. Med. Chem. Lett., 1994, 4:1053), a thioether, e.g., hexyl-S-tritylthiol (Manoharan et al., Ann. N.Y. Acad. Sci., 1992, 660:306; Manoharan et al., Bioorg. Med. Chem. Let., 1993, 3:2765), a thiocholesterol (Oberhauser et al., Nucl. Acids Res., 1992, 20:533), an aliphatic chain, e.g., dodecandiol or undecyl residues (Saison-Bchmoaras et al., EMBO J., 1991, 10:111; Kabanov et al., FEBS Lett., 1990, 259:327; Svinarchuk et al., Biochimie, 1993, 75:49), a phospholipid, e.g., di-hexadecyl-rac-glycerol or triethylammonium 1,2-di-O-hexadecyl-rac-glycero-3-H-phosphonate (Manoharan et al., Tetrahedron Lett., 1995, 36:3651; Shea et al., Nucl. Acids Res., 1990, 18:3777), a polyamine or a polyethylene glycol chain (Manoharan et al., Nucleosides & Nucleotides, 1995, 14:969), or adamantane acetic acid (Manoharan et al., Tetrahedron Lett., 1995, 36:3651), a palmityl moiety (Mishra et al., Biochim. Biophys. Acta, 1995, 1264:229), or an octadecylamine or hexylamino-carbonyl-oxycholesterol moiety (Crooke et al., J. Pharmacol. Exp. Ther., 1996, 277:923). Representative United States patents that teach the preparation of such RNA conjugates have been listed above. Typical conjugation protocols involve the synthesis of an RNAs bearing an aminolinker at one or more positions of the sequence. The amino group is then reacted with the molecule being conjugated using appropriate coupling or activating reagents. The conjugation reaction can be performed either with the RNA still bound to the solid support or following cleavage of the RNA, in solution phase. Purification of the RNA conjugate by HPLC typically affords the pure conjugate.

### V. Delivery of an iRNA of the Invention

[0392] The delivery of an iRNA of the invention to a cell e.g., a cell within a subject, such as a human subject (e.g., a subject in need thereof, such as a subject having a disease, disorder or condition associated with TTR) can be achieved in a number of different ways. For example, delivery may be performed by contacting a cell with an iRNA of the invention either in vitro or in vivo. In vivo delivery may also be performed directly by administering a composition comprising an iRNA, e.g., a dsRNA, to a subject. Alternatively, in vivo delivery may be performed indirectly by administering one or more vectors that encode and direct the expression of the iRNA. These alternatives are discussed further below.

[0393] In general, any method of delivering a nucleic acid molecule (in vitro or in vivo) can be adapted for use with an iRNA of the invention (see e.g., Akhtar S. and Julian R L. (1992) Trends Cell. Biol. 2 (5): 139-144 and WO94/02595, which are incorporated herein by reference in their entireties). For in vivo delivery, factors to consider in order to deliver an iRNA molecule include, for example, biological stability of the delivered molecule, prevention of non-specific effects, and accumulation of the delivered molecule in the target tissue. The non-specific effects of an iRNA can be minimized by local administration, for example, by direct injection or implantation into a tissue or topically administering the preparation. Local administration to a treatment site maximizes local concentration of the agent, limits the exposure of the agent to systemic tissues that can otherwise be harmed by the agent or that can degrade the agent, and permits a lower total dose of the iRNA molecule to be administered. Several studies have shown successful knockdown of gene products when an iRNA is administered locally. For example, intraocular delivery of a VEGF dsRNA by intravitreal injection in cynomolgus monkeys (Tolentino, M J., et al (2004) Retina 24:132-138) and subretinal injections in mice (Reich, S J., et al (2003) Mol. Vis. 9:210-216) were both shown to prevent neovascularization in an experimental model of age-related macular degeneration. In addition, direct intratumoral injection of a dsRNA in mice reduces tumor volume (Pille, J., et al (2005) Mol. Ther. 11:267-274) and can prolong survival of tumor-bearing mice (Kim, W J., et al (2006) Mol. Ther. 14:343-350; Li, S., et al (2007) Mol. Ther. 15:515-523). RNA interference has also shown success with local delivery to the CNS by direct injection (Dorn, G., et al. (2004) Nucleic Acids 32: c49; Tan, P H., et al (2005) Gene Ther. 12:59-66; Makimura, H., et al (2002) BMC Neurosci. 3:18; Shishkina, G T., et al (2004) Neuroscience 129:521-528; Thakker, E R., et al (2004) Proc. Natl. Acad. Sci. U.S.A. 101:17270-17275; Akancya, Y., et al (2005) J. Neurophysiol. 93:594-602) and to the lungs by intranasal administration (Howard, K A., et al (2006) Mol. Ther. 14:476-484; Zhang, X., et al (2004) J. Biol. Chem. 279:10677-10684; Bitko, V., et al (2005) Nat. Med. 11:50-55). For administering an iRNA systemically for the treatment of a disease, the RNA can be modified or alternatively delivered using a drug delivery system; both methods act to prevent the rapid degradation of the dsRNA by endo- and exo-nucleases in vivo. Modification of the RNA or the pharmaceutical carrier can also permit targeting of the iRNA composition to the target tissue and avoid undesirable off-target effects. iRNA molecules can be modified by chemical conjugation to lipophilic groups such as cholesterol to enhance cellular uptake and prevent degradation. For example, an iRNA directed against ApoB conjugated to a lipophilic cholesterol moiety was injected systemically into mice and resulted in knockdown of apoB mRNA in both the liver and jejunum (Soutschek, J., et al (2004) Nature 432:173-178). Conjugation of an iRNA to an aptamer has been shown to inhibit tumor growth and mediate tumor regression in a mouse model of prostate cancer (McNamara, J O., et al (2006) Nat. Biotechnol. 24:1005-1015). In an alternative embodiment, the iRNA can be delivered using drug delivery systems such as a nanoparticle, a dendrimer, a polymer, liposomes, or a cationic delivery system. Positively charged cationic delivery systems facilitate binding of an iRNA molecule (negatively charged) and also enhance interactions at the negatively charged cell membrane to permit efficient uptake of an iRNA by the cell. Cationic lipids, dendrimers, or polymers can either be bound to an iRNA, or induced to form a vesicle or micelle (see e.g., Kim S H., et al (2008) Journal of Controlled Release 129 (2): 107-116) that encases an iRNA. The formation of vesicles or micelles further prevents degradation of the iRNA when administered systemically. Methods for making and administering cationic-iRNA complexes are well within the abilities of one skilled in the art (see e.g., Sorensen, D R., et al (2003) J. Mol. Biol 327:761-766; Verma, U N., et al (2003) Clin. Cancer Res. 9:1291-1300; Arnold, A S et al (2007) J. Hypertens. 25:197-205, which are incorporated herein by reference in their entirety). Some non-limiting examples of drug delivery systems useful for systemic delivery of iRNAs include DOTAP (Sorensen, D R., et al (2003), supra; Verma, U N., et al (2003), supra), Oligofectamine, “solid nucleic acid lipid particles” (Zimmermann, T S., et al (2006) Nature 441:111-114), cardiolipin (Chien, P Y., et al (2005) Cancer Gene Ther. 12:321-328; Pal, A., et al (2005) Int J. Oncol. 26:1087-1091), polyethyleneimine (Bonnet ME., et al (2008) Pharm. Res. August 16 Epub ahead of print; Aigner, A. (2006) J. Biomed. Biotechnol. 71659), Arg-Gly-Asp (RGD) peptides (Liu, S. (2006) Mol. Pharm. 3:472-487), and polyamidoamines (Tomalia, D A., et al (2007) Biochem. Soc. Trans. 35:61-67; Yoo, H., et al (1999) Pharm. Res. 16:1799-1804). In some embodiments, an iRNA forms a complex with cyclodextrin for systemic administration. Methods for administration and pharmaceutical compositions of iRNAs and cyclodextrins can be found in U.S. Pat. No. 7,427,605, which is herein incorporated by reference in its entirety.

A. Vector Encoded iRNAs of the Invention

[0394] iRNA targeting the TTR gene can be expressed from transcription units inserted into DNA or RNA vectors (see, e.g., Couture, A, et al., TIG. (1996), 12:5-10; Skillern, A., et al., International PCT Publication No. WO 00/22113, Conrad, International PCT Publication No. WO 00/22114, and Conrad, U.S. Pat. No. 6,054,299). Expression can be transient (on the order of hours to weeks) or sustained (weeks to months or longer), depending upon the specific construct used and the target tissue or cell type. These transgenes can be introduced as a linear construct, a circular plasmid, or a viral vector, which can be an integrating or non-integrating vector. The transgene can also be constructed to permit it to be inherited as an extrachromosomal plasmid (Gassmann, et al., Proc. Natl. Acad. Sci. USA (1995) 92:1292).

[0395] The individual strand or strands of an iRNA can be transcribed from a promoter on an expression vector. Where two separate strands are to be expressed to generate, for example, a dsRNA, two separate expression vectors can be co-introduced (e.g., by transfection or infection) into a target cell. Alternatively each individual strand of a dsRNA can be transcribed by promoters both of which are located on the same expression plasmid. In one embodiment, a dsRNA is expressed as inverted repeat polynucleotides joined by a linker polynucleotide sequence such that the dsRNA has a stem and loop structure.

[0396] iRNA expression vectors are generally DNA plasmids or viral vectors. Expression vectors compatible with eukaryotic cells, preferably those compatible with vertebrate cells, can be used to produce recombinant constructs for the expression of an iRNA as described herein. Eukaryotic cell expression vectors are well known in the art and are available from a number of commercial sources. Typically, such vectors are provided containing convenient restriction sites for insertion of the desired nucleic acid segment. Delivery of iRNA expressing vectors can be systemic, such as by intravenous or intramuscular administration, by administration to target cells ex-planted from the patient followed by reintroduction into the patient, or by any other means that allows for introduction into a desired target cell.

[0397] iRNA expression plasmids can be transfected into target cells as a complex with cationic lipid carriers (e.g., Oligofectamine) or non-cationic lipid-based carriers (e.g., Transit-TKO™). Multiple lipid transfections for iRNA-mediated knockdowns targeting different regions of a target RNA over a period of a week or more are also contemplated by the invention. Successful introduction of vectors into host cells can be monitored using various known methods. For example, transient transfection can be signaled with a reporter, such as a fluorescent marker, such as Green Fluorescent Protein (GFP). Stable transfection of cells ex vivo can be ensured using markers that provide the transfected cell with resistance to specific environmental factors (e.g., antibiotics and drugs), such as hygromycin B resistance.

[0398] Viral vector systems which can be utilized with the methods and compositions described herein include, but are not limited to, (a) adenovirus vectors; (b) retrovirus vectors, including but not limited to lentiviral vectors, moloney murine leukemia virus, etc.; (c) adeno-associated virus vectors; (d) herpes simplex virus vectors; (c) SV 40 vectors; (f) polyoma virus vectors; (g) papilloma virus vectors; (h) picornavirus vectors; (i) pox virus vectors such as an orthopox, e.g., vaccinia virus vectors or avipox, e.g. canary pox or fowl pox; and (j) a helper-dependent or gutless adenovirus. Replication-defective viruses can also be advantageous. Different vectors will or will not become incorporated into the cells' genome. The constructs can include viral sequences for transfection, if desired. Alternatively, the construct can be incorporated into vectors capable of episomal replication, e.g. EPV and EBV vectors. Constructs for the recombinant expression of an iRNA will generally require regulatory elements, e.g., promoters, enhancers, etc., to ensure the expression of the iRNA in target cells. Other aspects to consider for vectors and constructs are further described below.

[0399] Vectors useful for the delivery of an iRNA will include regulatory elements (promoter, enhancer, etc.) sufficient for expression of the iRNA in the desired target cell or tissue. The regulatory elements can be chosen to provide either constitutive or regulated/inducible expression.

[0400] Expression of the iRNA can be precisely regulated, for example, by using an inducible regulatory sequence that is sensitive to certain physiological regulators, e.g., circulating glucose levels, or hormones (Docherty et al., 1994, FASEB J. 8:20-24). Such inducible expression systems, suitable for the control of dsRNA expression in cells or in mammals include, for example, regulation by ecdysone, by estrogen, progesterone, tetracycline, chemical inducers of dimerization, and isopropyl-beta-DI-thiogalactopyranoside (IPTG). A person skilled in the art would be able to choose the appropriate regulatory/promoter sequence based on the intended use of the iRNA transgene.

[0401] Viral vectors that contain nucleic acid sequences encoding an iRNA can be used. For example, a retroviral vector can be used (see Miller et al., Meth. Enzymol. 217:581-599 (1993)). These retroviral vectors contain the components necessary for the correct packaging of the viral genome and integration into the host cell DNA. The nucleic acid sequences encoding an iRNA are cloned into one or more vectors, which facilitate delivery of the nucleic acid into a patient. More detail about retroviral vectors can be found, for example, in Boesen et al., Biotherapy 6:291-302 (1994), which describes the use of a retroviral vector to deliver the mdr1 gene to hematopoietic stem cells in order to make the stem cells more resistant to chemotherapy. Other references illustrating the use of retroviral vectors in gene therapy are: Clowes et al., J. Clin. Invest. 93:644-651 (1994); Kiem et al., Blood 83:1467-1473 (1994); Salmons and Gunzberg, Human Gene Therapy 4:129-141 (1993); and Grossman and Wilson, Curr. Opin. in Genetics and Devel. 3:110-114 (1993). Lentiviral vectors contemplated for use include, for example, the HIV based vectors described in U.S. Pat. Nos. 6,143,520; 5,665,557; and 5,981,276, which are herein incorporated by reference.

[0402] Adenoviruses are also contemplated for use in delivery of iRNAs of the invention. Adenoviruses are especially attractive vehicles, e.g., for delivering genes to respiratory epithelia. Adenoviruses naturally infect respiratory epithelia where they cause a mild disease. Other targets for adenovirus-based delivery systems are liver, the central nervous system, endothelial cells, and muscle. Adenoviruses have the advantage of being capable of infecting non-dividing cells. Kozarsky and Wilson, Current Opinion in Genetics and Development 3:499-503 (1993) present a review of adenovirus-based gene therapy. Bout et al., Human Gene Therapy 5:3-10 (1994) demonstrated the use of adenovirus vectors to transfer genes to the respiratory epithelia of rhesus monkeys. Other instances of the use of adenoviruses in gene therapy can be found in Rosenfeld et al., Science 252:431-434 (1991); Rosenfeld et al., Cell 68:143-155 (1992); Mastrangeli et al., J. Clin. Invest. 91:225-234 (1993); PCT Publication WO94/12649; and Wang, et al., Gene Therapy 2:775-783 (1995). A suitable AV vector for expressing an iRNA featured in the invention, a method for constructing the recombinant AV vector, and a method for delivering the vector into target cells, are described in Xia H et al. (2002), Nat. Biotech. 20:1006-1010.

[0403] Adeno-associated virus (AAV) vectors may also be used to delivery an iRNA of the invention (Walsh et al., Proc. Soc. Exp. Biol. Med. 204:289-300 (1993); U.S. Pat. No. 5,436,146). In one embodiment, the iRNA can be expressed as two separate, complementary single-stranded RNA molecules from a recombinant AAV vector having, for example, either the U6 or H1 RNA promoters, or the cytomegalovirus (CMV) promoter. Suitable AAV vectors for expressing the dsRNA featured in the invention, methods for constructing the recombinant AV vector, and methods for delivering the vectors into target cells are described in Samulski R et al. (1987), J. Virol. 61:3096-3101; Fisher K J et al. (1996), J. Virol, 70:520-532; Samulski R et al. (1989), J. Virol. 63:3822-3826; U.S. Pat. Nos. 5,252,479; 5,139,941; International Patent Application No. WO 94/13788; and International Patent Application No. WO 93/24641, the entire disclosures of which are herein incorporated by reference.

[0404] Another viral vector suitable for delivery of an iRNA of the invention is a pox virus such as a vaccinia virus, for example an attenuated vaccinia such as Modified Virus Ankara (MVA) or NYVAC, an avipox such as fowl pox or canary pox.

[0405] The tropism of viral vectors can be modified by pseudotyping the vectors with envelope proteins or other surface antigens from other viruses, or by substituting different viral capsid proteins, as appropriate. For example, lentiviral vectors can be pseudotyped with surface proteins from vesicular stomatitis virus (VSV), rabies, Ebola, Mokola, and the like. AAV vectors can be made to target different cells by engineering the vectors to express different capsid protein serotypes; see, e.g., Rabinowitz J E et al. (2002), J Virol 76:791-801, the entire disclosure of which is herein incorporated by reference.

[0406] The pharmaceutical preparation of a vector can include the vector in an acceptable diluent, or can include a slow release matrix in which the gene delivery vehicle is imbedded. Alternatively, where the complete gene delivery vector can be produced intact from recombinant cells, e.g., retroviral vectors, the pharmaceutical preparation can include one or more cells which produce the gene delivery system.

### VI. Pharmaceutical Compositions of the Invention

[0407] The present invention also includes pharmaceutical compositions and formulations which include the iRNAs of the invention. In one embodiment, provided herein are pharmaceutical compositions containing an iRNA, as described herein, and a pharmaceutically acceptable carrier. The pharmaceutical compositions containing the iRNA are useful for treating a disease or disorder associated with the expression or activity of a TTR gene. Such pharmaceutical compositions are formulated based on the mode of delivery. One example is compositions that are formulated for systemic administration via parenteral delivery, e.g., by subcutaneous (SC) or intravenous (IV) delivery. Another example is compositions that are formulated for direct delivery into the brain parenchyma, e.g., by infusion into the brain, such as by continuous pump infusion. The pharmaceutical compositions of the invention may be administered in dosages sufficient to inhibit expression of a TTR gene. In one embodiment, the iRNA agents of the invention, e.g., a dsRNA agent, is formulated for subcutaneous administration in a pharmaceutically acceptable carrier

[0408] The pharmaceutical composition can be administered by intravenous infusion over a period of time, such as over a 5, 6, 7, 8, 9, 10, 11, 12, 13, 14, 15, 16, 17, 18, 19, 20, and 21, 22, 23, 24, or about a 25 minute period. The administration may be repeated, for example, on a regular basis, such as weekly, biweekly (i.e., every two weeks) for one month, two months, three months, four months or longer. Administration may also be repeated, for example, on a monthly basis, or on a quarterly basis, e.g., approximately every 12 weeks. After an initial treatment regimen, the treatments can be administered on a less frequent basis. For example, after administration weekly or biweekly for three months, administration can be repeated once per month, for six months or a year or longer.

[0409] The pharmaceutical composition can be administered once daily, or the iRNA can be administered as two, three, or more sub-doses at appropriate intervals throughout the day or even using continuous infusion or delivery through a controlled release formulation. In that case, the iRNA contained in each sub-dose must be correspondingly smaller in order to achieve the total daily dosage. The dosage unit can also be compounded for delivery over several days, e.g., using a conventional sustained release formulation which provides sustained release of the iRNA over a several day period. Sustained release formulations are well known in the art and are particularly useful for delivery of agents at a particular site, such as could be used with the agents of the present invention. In this embodiment, the dosage unit contains a corresponding multiple of the daily dose.

[0410] In other embodiments, a single dose of the pharmaceutical compositions can be long lasting, such that subsequent doses are administered at not more than 3, 4, or 5 day intervals, at not more than 1, 2, 3, or 4 week intervals, or at not more than 9, 10, 11, or 12 week intervals. In some embodiments of the invention, a single dose of the pharmaceutical compositions of the invention is administered once per week. In other embodiments of the invention, a single dose of the pharmaceutical compositions of the invention is administered bi-monthly. In other embodiments, a single dose of the pharmaceutical compositions of the invention is administered monthly. In still other embodiments, a single dose of the pharmaceutical compositions of the invention is administered quarterly.

[0411] The skilled artisan will appreciate that certain factors can influence the dosage and timing required to effectively treat a subject, including but not limited to the severity of the disease or disorder, previous treatments, the general health and/or age of the subject, and other diseases present. Moreover, treatment of a subject with a therapeutically effective amount of a composition can include a single treatment or a series of treatments. Estimates of effective dosages and in vivo half-lives for the individual iRNAs encompassed by the invention can be made using conventional methodologies or on the basis of in vivo testing using an appropriate animal model, as described elsewhere herein.

[0412] The pharmaceutical compositions of the present invention can be administered in a number of ways depending upon whether local or systemic treatment is desired and upon the area to be treated. Administration can be topical (e.g., by a transdermal patch), pulmonary, e.g., by inhalation or insufflation of powders or aerosols, including by nebulizer; intratracheal, intranasal, epidermal and transdermal, oral or parenteral. Parenteral administration includes intravenous, intraarterial, subcutaneous, intraperitoneal or intramuscular injection or infusion; subdermal, e.g., via an implanted device; or intracranial, e.g., by intraparenchymal, intrathecal or intraventricular, administration.

[0413] The iRNA can be delivered in a manner to target a particular tissue, such as the liver (e.g., the hepatocytes of the liver).

[0414] Pharmaceutical compositions and formulations for topical administration can include transdermal patches, ointments, lotions, creams, gels, drops, suppositories, sprays, liquids and powders. Conventional pharmaceutical carriers, aqueous, powder or oily bases, thickeners and the like can be necessary or desirable. Coated condoms, gloves and the like can also be useful. Suitable topical formulations include those in which the iRNAs featured in the invention are in admixture with a topical delivery agent such as lipids, liposomes, fatty acids, fatty acid esters, steroids, chelating agents and surfactants. Suitable lipids and liposomes include neutral (e.g., diolcoylphosphatidyl DOPE ethanolamine, dimyristoylphosphatidyl choline DMPC, distcarolyphosphatidyl cholinc) negative (e.g., dimyristoylphosphatidyl glycerol DMPG) and cationic (e.g., diolcoyltetramethylaminopropyl DOTAP and diolcoylphosphatidyl ethanolamine DOTMA). iRNAs featured in the invention can be encapsulated within liposomes or can form complexes thereto, in particular to cationic liposomes. Alternatively, iRNAs can be complexed to lipids, in particular to cationic lipids. Suitable fatty acids and esters include but are not limited to arachidonic acid, oleic acid, eicosanoic acid, lauric acid, caprylic acid, capric acid, myristic acid, palmitic acid, stearic acid, linoleic acid, linolenic acid, dicaprate, tricaprate, monoolein, dilaurin, glyceryl 1-monocaprate, 1-dodecylazacycloheptan-2-one, an acylcarnitine, an acylcholine, or a C1-20 alkyl ester (e.g., isopropylmyristate IPM), monoglyceride, diglyceride or pharmaceutically acceptable salt thereof). Topical formulations are described in detail in U.S. Pat. No. 6,747,014, which is incorporated herein by reference.

A. iRNA Formulations Comprising Membranous Molecular Assemblies

[0415] An iRNA for use in the compositions and methods of the invention can be formulated for delivery in a membranous molecular assembly, e.g., a liposome or a micelle. As used herein, the term “liposome” refers to a vesicle composed of amphiphilic lipids arranged in at least one bilayer, e.g., one bilayer or a plurality of bilayers. Liposomes include unilamellar and multilamellar vesicles that have a membrane formed from a lipophilic material and an aqueous interior. The aqueous portion contains the iRNA composition. The lipophilic material isolates the aqueous interior from an aqueous exterior, which typically does not include the iRNA composition, although in some examples, it may. Liposomes are useful for the transfer and delivery of active ingredients to the site of action. Because the liposomal membrane is structurally similar to biological membranes, when liposomes are applied to a tissue, the liposomal bilayer fuses with bilayer of the cellular membranes. As the merging of the liposome and cell progresses, the internal aqueous contents that include the iRNA are delivered into the cell where the iRNA can specifically bind to a target RNA and can mediate iRNA. In some cases the liposomes are also specifically targeted, e.g., to direct the iRNA to particular cell types.

[0416] A liposome containing an iRNA agent can be prepared by a variety of methods. In one example, the lipid component of a liposome is dissolved in a detergent so that micelles are formed with the lipid component. For example, the lipid component can be an amphipathic cationic lipid or lipid conjugate. The detergent can have a high critical micelle concentration and may be nonionic. Exemplary detergents include cholate, CHAPS, octylglucoside, deoxycholate, and lauroyl sarcosine. The iRNA agent preparation is then added to the micelles that include the lipid component. The cationic groups on the lipid interact with the iRNA agent and condense around the iRNA agent to form a liposome. After condensation, the detergent is removed, e.g., by dialysis, to yield a liposomal preparation of iRNA agent.

[0417] If necessary a carrier compound that assists in condensation can be added during the condensation reaction, e.g., by controlled addition. For example, the carrier compound can be a polymer other than a nucleic acid (e.g., spermine or spermidine). pH can also adjusted to favor condensation.

[0418] Methods for producing stable polynucleotide delivery vehicles, which incorporate a polynucleotide/cationic lipid complex as structural components of the delivery vehicle, are further described in, e.g., WO 96/37194, the entire contents of which are incorporated herein by reference. Liposome formation can also include one or more aspects of exemplary methods described in Felgner, P. L. et al., Proc. Natl. Acad. Sci., USA 8:7413-7417, 1987; U.S. Pat. Nos. 4,897,355; 5,171,678; Bangham, et al. M. Mol. Biol. 23:238, 1965; Olson, et al. Biochim. Biophys. Acta 557:9, 1979; Szoka, et al. Proc. Natl. Acad. Sci. 75:4194, 1978; Mayhew, et al. Biochim. Biophys. Acta 775:169, 1984; Kim, et al. Biochim. Biophys. Acta 728:339, 1983; and Fukunaga, et al. Endocrinol. 115:757, 1984. Commonly used techniques for preparing lipid aggregates of appropriate size for use as delivery vehicles include sonication and freeze-thaw plus extrusion (see, e.g., Mayer, et al. Biochim. Biophys. Acta 858:161, 1986). Microfluidization can be used when consistently small (50 to 200 nm) and relatively uniform aggregates are desired (Mayhew, et al. Biochim. Biophys. Acta 775:169, 1984). These methods are readily adapted to packaging iRNA agent preparations into liposomes.

[0419] Liposomes fall into two broad classes. Cationic liposomes are positively charged liposomes which interact with the negatively charged nucleic acid molecules to form a stable complex. The positively charged nucleic acid/liposome complex binds to the negatively charged cell surface and is internalized in an endosome. Due to the acidic pH within the endosome, the liposomes are ruptured, releasing their contents into the cell cytoplasm (Wang et al., Biochem. Biophys. Res. Commun., 1987, 147, 980-985).

[0420] Liposomes which are pH-sensitive or negatively-charged, entrap nucleic acids rather than complex with it. Since both the nucleic acid and the lipid are similarly charged, repulsion rather than complex formation occurs. Nevertheless, some nucleic acid is entrapped within the aqueous interior of these liposomes. pH-sensitive liposomes have been used to deliver nucleic acids encoding the thymidine kinase gene to cell monolayers in culture. Expression of the exogenous gene was detected in the target cells (Zhou et al., Journal of Controlled Release, 1992, 19, 269-274).

[0421] One major type of liposomal composition includes phospholipids other than naturally-derived phosphatidylcholine. Neutral liposome compositions, for example, can be formed from dimyristoyl phosphatidylcholine (DMPC) or dipalmitoyl phosphatidylcholine (DPPC). Anionic liposome compositions generally are formed from dimyristoyl phosphatidylglycerol, while anionic fusogenic liposomes are formed primarily from diolcoyl phosphatidylethanolamine (DOPE). Another type of liposomal composition is formed from phosphatidylcholine (PC) such as, for example, soybean PC, and egg PC. Another type is formed from mixtures of phospholipid and/or phosphatidylcholine and/or cholesterol.

[0422] Examples of other methods to introduce liposomes into cells in vitro and in vivo include U.S. Pat. Nos. 5,283,185; 5,171,678; WO 94/00569; WO 93/24640; WO 91/16024; Felgner, J. Biol. Chem. 269:2550, 1994; Nabel, Proc. Natl. Acad. Sci. 90:11307, 1993; Nabel, Human Gene Ther. 3:649, 1992; Gershon, Biochem. 32:7143, 1993; and Strauss EMBO J. 11:417, 1992.

[0423] Non-ionic liposomal systems have also been examined to determine their utility in the delivery of drugs to the skin, in particular systems comprising non-ionic surfactant and cholesterol. Non-ionic liposomal formulations comprising Novasome™ I (glyceryl dilaurate/cholesterol/polyoxyethylene-10-stearyl ether) and Novasome™ II (glyceryl distearate/cholesterol/polyoxyethylene-10-stearyl ether) were used to deliver cyclosporin-A into the dermis of mouse skin. Results indicated that such non-ionic liposomal systems were effective in facilitating the deposition of cyclosporine A into different layers of the skin (Hu et al. S.T.P. Pharma. Sci., 1994, 4 (6) 466).

[0424] Liposomes also include “sterically stabilized” liposomes, a term which, as used herein, refers to liposomes comprising one or more specialized lipids that, when incorporated into liposomes, result in enhanced circulation lifetimes relative to liposomes lacking such specialized lipids. Examples of sterically stabilized liposomes are those in which part of the vesicle-forming lipid portion of the liposome (A) comprises one or more glycolipids, such as monosialoganglioside G_{M1}, or (B) is derivatized with one or more hydrophilic polymers, such as a polyethylene glycol (PEG) moiety. While not wishing to be bound by any particular theory, it is thought in the art that, at least for sterically stabilized liposomes containing gangliosides, sphingomyelin, or PEG-derivatized lipids, the enhanced circulation half-life of these sterically stabilized liposomes derives from a reduced uptake into cells of the reticuloendothelial system (RES) (Allen et al., FEBS Letters, 1987, 223, 42; Wu et al., Cancer Research, 1993, 53, 3765).

[0425] Various liposomes comprising one or more glycolipids are known in the art. Papahadjopoulos et al. (Ann. N.Y. Acad. Sci., 1987, 507, 64) reported the ability of monosialoganglioside G_{M1}, galactocerebroside sulfate and phosphatidylinositol to improve blood half-lives of liposomes. These findings were expounded upon by Gabizon et al. (Proc. Natl. Acad. Sci. U.S.A., 1988, 85, 6949). U.S. Pat. No. 4,837,028 and WO 88/04924, both to Allen et al., disclose liposomes comprising (1) sphingomyelin and (2) the ganglioside G_{M1} or a galactocerebroside sulfate ester. U.S. Pat. No. 5,543,152 (Webb et al.) discloses liposomes comprising sphingomyelin. Liposomes comprising 1,2-sn-dimyristoylphosphatidylcholine are disclosed in WO 97/13499 (Lim et al).

[0426] In one embodiment, cationic liposomes are used. Cationic liposomes possess the advantage of being able to fuse to the cell membrane. Non-cationic liposomes, although not able to fuse as efficiently with the plasma membrane, are taken up by macrophages in vivo and can be used to deliver iRNA agents to macrophages.

[0427] Further advantages of liposomes include: liposomes obtained from natural phospholipids are biocompatible and biodegradable; liposomes can incorporate a wide range of water and lipid soluble drugs; liposomes can protect encapsulated iRNA agents in their internal compartments from metabolism and degradation (Rosoff, in “Pharmaceutical Dosage Forms,” Lieberman, Rieger and Banker (Eds.), 1988, volume 1, p. 245). Important considerations in the preparation of liposome formulations are the lipid surface charge, vesicle size and the aqueous volume of the liposomes.

[0428] A positively charged synthetic cationic lipid, N-[1-(2,3-diolcyloxy)propyl]-N,N,N-trimethylammonium chloride (DOTMA) can be used to form small liposomes that interact spontaneously with nucleic acid to form lipid-nucleic acid complexes which are capable of fusing with the negatively charged lipids of the cell membranes of tissue culture cells, resulting in delivery of iRNA agent (see, e.g., Felgner, P. L. et al., Proc. Natl. Acad. Sci., USA 8:7413-7417, 1987 and U.S. Pat. No. 4,897,355 for a description of DOTMA and its use with DNA).

[0429] A DOTMA analogue, 1,2-bis(olcoyloxy)-3-(trimethylammonia) propanc (DOTAP) can be used in combination with a phospholipid to form DNA-complexing vesicles. Lipofectin™ Bethesda Research Laboratories, Gaithersburg, Md.) is an effective agent for the delivery of highly anionic nucleic acids into living tissue culture cells that comprise positively charged DOTMA liposomes which interact spontaneously with negatively charged polynucleotides to form complexes. When enough positively charged liposomes are used, the net charge on the resulting complexes is also positive. Positively charged complexes prepared in this way spontaneously attach to negatively charged cell surfaces, fuse with the plasma membrane, and efficiently deliver functional nucleic acids into, for example, tissue culture cells. Another commercially available cationic lipid, 1,2-bis(olcoyloxy)-3,3-(trimethylammonia)propane (“DOTAP”) (Bochringer Mannheim, Indianapolis, Indiana) differs from DOTMA in that the olcoyl moieties are linked by ester, rather than ether linkages.

[0430] Other reported cationic lipid compounds include those that have been conjugated to a variety of moieties including, for example, carboxyspermine which has been conjugated to one of two types of lipids and includes compounds such as 5-carboxyspermylglycine dioctaoleoylamide (“DOGS”) (Transfectam™, Promega, Madison, Wisconsin) and dipalmitoylphosphatidylethanolamine 5-carboxyspermyl-amide (“DPPES”) (see, e.g., U.S. Pat. No. 5,171,678).

[0431] Another cationic lipid conjugate includes derivatization of the lipid with cholesterol (“DC-Chol”) which has been formulated into liposomes in combination with DOPE (See, Gao, X. and Huang, L., Biochim. Biophys. Res. Commun. 179:280, 1991). Lipopolylysine, made by conjugating polylysine to DOPE, has been reported to be effective for transfection in the presence of serum (Zhou, X. et al., Biochim. Biophys. Acta 1065:8, 1991). For certain cell lines, these liposomes containing conjugated cationic lipids, are said to exhibit lower toxicity and provide more efficient transfection than the DOTMA-containing compositions. Other commercially available cationic lipid products include DMRIE and DMRIE-HP (Vical, La Jolla, California) and Lipofectamine (DOSPA) (Life Technology, Inc., Gaithersburg, Maryland). Other cationic lipids suitable for the delivery of oligonucleotides are described in WO 98/39359 and WO 96/37194.

[0432] Liposomal formulations are particularly suited for topical administration, liposomes present several advantages over other formulations. Such advantages include reduced side effects related to high systemic absorption of the administered drug, increased accumulation of the administered drug at the desired target, and the ability to administer iRNA agent into the skin. In some implementations, liposomes are used for delivering iRNA agent to epidermal cells and also to enhance the penetration of iRNA agent into dermal tissues, e.g., into skin. For example, the liposomes can be applied topically. Topical delivery of drugs formulated as liposomes to the skin has been documented (see, e.g., Weiner et al., Journal of Drug Targeting, 1992, vol. 2, 405-410 and du Plessis et al., Antiviral Research, 18, 1992, 259-265; Mannino, R. J. and Fould-Fogerite, S., Biotechniques 6:682-690, 1988; Itani, T. et al. Gene 56:267-276. 1987; Nicolau, C. et al. Meth. Enz. 149:157-176, 1987; Straubinger, R. M. and Papahadjopoulos, D. Meth. Enz. 101:512-527, 1983; Wang, C. Y. and Huang, L., Proc. Natl. Acad. Sci. USA 84:7851-7855, 1987).

[0433] Non-ionic liposomal systems have also been examined to determine their utility in the delivery of drugs to the skin, in particular systems comprising non-ionic surfactant and cholesterol. Non-ionic liposomal formulations comprising Novasome I (glyceryl dilaurate/cholesterol/polyoxyethylene-10-stearyl ether) and Novasome II (glyceryl distearate/cholesterol/polyoxyethylene-10-stearyl ether) were used to deliver a drug into the dermis of mouse skin. Such formulations with iRNA agent are useful for treating a dermatological disorder.

[0434] Liposomes that include iRNA can be made highly deformable. Such deformability can enable the liposomes to penetrate through pore that are smaller than the average radius of the liposome. For example, transfersomes are a type of deformable liposomes. Transferosomes can be made by adding surface edge activators, usually surfactants, to a standard liposomal composition. Transfersomes that include iRNA agent can be delivered, for example, subcutaneously by infection in order to deliver iRNA agent to keratinocytes in the skin. In order to cross intact mammalian skin, lipid vesicles must pass through a series of fine pores, each with a diameter less than 50 nm, under the influence of a suitable transdermal gradient. In addition, due to the lipid properties, these transferosomes can be self-optimizing (adaptive to the shape of pores, e.g., in the skin), self-repairing, and can frequently reach their targets without fragmenting, and often self-loading.

[0435] Other formulations amenable to the present invention are described in PCT Publication No. WO 2008/042973, the entire contents of which are incorporated herein by reference.

[0436] Transfersomes are yet another type of liposomes, and are highly deformable lipid aggregates which are attractive candidates for drug delivery vehicles. Transfersomes can be described as lipid droplets which are so highly deformable that they are easily able to penetrate through pores which are smaller than the droplet. Transfersomes are adaptable to the environment in which they are used, e.g., they are self-optimizing (adaptive to the shape of pores in the skin), self-repairing, frequently reach their targets without fragmenting, and often self-loading. To make transfersomes it is possible to add surface edge-activators, usually surfactants, to a standard liposomal composition. Transfersomes have been used to deliver serum albumin to the skin. The transfersome-mediated delivery of serum albumin has been shown to be as effective as subcutaneous injection of a solution containing serum albumin.

[0437] Surfactants find wide application in formulations such as emulsions (including microemulsions) and liposomes. The most common way of classifying and ranking the properties of the many different types of surfactants, both natural and synthetic, is by the use of the hydrophile/lipophile balance (HLB). The nature of the hydrophilic group (also known as the “head”) provides the most useful means for categorizing the different surfactants used in formulations (Rieger, in “Pharmaceutical Dosage Forms”, Marcel Dekker, Inc., New York, N.Y., 1988, p. 285).

[0438] If the surfactant molecule is not ionized, it is classified as a nonionic surfactant. Nonionic surfactants find wide application in pharmaceutical and cosmetic products and are usable over a wide range of pH values. In general their HLB values range from 2 to about 18 depending on their structure. Nonionic surfactants include nonionic esters such as ethylene glycol esters, propylene glycol esters, glyceryl esters, polyglyceryl esters, sorbitan esters, sucrose esters, and ethoxylated esters. Nonionic alkanolamides and ethers such as fatty alcohol ethoxylates, propoxylated alcohols, and ethoxylated/propoxylated block polymers are also included in this class. The polyoxyethylene surfactants are the most popular members of the nonionic surfactant class.

[0439] If the surfactant molecule carries a negative charge when it is dissolved or dispersed in water, the surfactant is classified as anionic. Anionic surfactants include carboxylates such as soaps, acyl lactylates, acyl amides of amino acids, esters of sulfuric acid such as alkyl sulfates and ethoxylated alkyl sulfates, sulfonates such as alkyl benzene sulfonates, acyl isethionates, acyl taurates and sulfosuccinates, and phosphates. The most important members of the anionic surfactant class are the alkyl sulfates and the soaps.

[0440] If the surfactant molecule carries a positive charge when it is dissolved or dispersed in water, the surfactant is classified as cationic. Cationic surfactants include quaternary ammonium salts and ethoxylated amines. The quaternary ammonium salts are the most used members of this class.

[0441] If the surfactant molecule has the ability to carry either a positive or negative charge, the surfactant is classified as amphoteric. Amphoteric surfactants include acrylic acid derivatives, substituted alkylamides, N-alkylbetaines and phosphatides.

[0442] The use of surfactants in drug products, formulations and in emulsions has been reviewed (Rieger, in “Pharmaceutical Dosage Forms”, Marcel Dekker, Inc., New York, N.Y., 1988, p. 285).

[0443] The iRNA for use in the methods of the invention can also be provided as micellar formulations. “Micelles” are defined herein as a particular type of molecular assembly in which amphipathic molecules are arranged in a spherical structure such that all the hydrophobic portions of the molecules are directed inward, leaving the hydrophilic portions in contact with the surrounding aqueous phase. The converse arrangement exists if the environment is hydrophobic.

[0444] A mixed micellar formulation suitable for delivery through transdermal membranes may be prepared by mixing an aqueous solution of the siRNA composition, an alkali metal C₈ to C₂₂ alkyl sulphate, and a micelle forming compounds. Exemplary micelle forming compounds include lecithin, hyaluronic acid, pharmaceutically acceptable salts of hyaluronic acid, glycolic acid, lactic acid, chamomile extract, cucumber extract, oleic acid, linoleic acid, linolenic acid, monoolein, monooleates, monolaurates, borage oil, evening of primrose oil, menthol, trihydroxy oxo cholanyl glycine and pharmaceutically acceptable salts thereof, glycerin, polyglycerin, lysine, polylysine, triolein, polyoxyethylene ethers and analogues thereof, polidocanol alkyl ethers and analogues thereof, chenodeoxycholate, deoxycholate, and mixtures thereof. The micelle forming compounds may be added at the same time or after addition of the alkali metal alkyl sulphate. Mixed micelles will form with substantially any kind of mixing of the ingredients but vigorous mixing in order to provide smaller size micelles.

[0445] In one method a first micellar composition is prepared which contains the siRNA composition and at least the alkali metal alkyl sulphate. The first micellar composition is then mixed with at least three micelle forming compounds to form a mixed micellar composition. In another method, the micellar composition is prepared by mixing the siRNA composition, the alkali metal alkyl sulphate and at least one of the micelle forming compounds, followed by addition of the remaining micelle forming compounds, with vigorous mixing.

[0446] Phenol and/or m-cresol may be added to the mixed micellar composition to stabilize the formulation and protect against bacterial growth. Alternatively, phenol and/or m-cresol may be added with the micelle forming ingredients. An isotonic agent such as glycerin may also be added after formation of the mixed micellar composition.

[0447] For delivery of the micellar formulation as a spray, the formulation can be put into an aerosol dispenser and the dispenser is charged with a propellant. The propellant, which is under pressure, is in liquid form in the dispenser. The ratios of the ingredients are adjusted so that the aqueous and propellant phases become one, i.e., there is one phase. If there are two phases, it is necessary to shake the dispenser prior to dispensing a portion of the contents, e.g., through a metered valve. The dispensed dose of pharmaceutical agent is propelled from the metered valve in a fine spray.

[0448] Propellants may include hydrogen-containing chlorofluorocarbons, hydrogen-containing fluorocarbons, dimethyl ether and diethyl ether. In certain embodiments, HFA 134a (1,1,1,2 tetrafluoroethane) may be used.

[0449] The specific concentrations of the essential ingredients can be determined by relatively straightforward experimentation. For absorption through the oral cavities, it is often desirable to increase, e.g., at least double or triple, the dosage for through injection or administration through the gastrointestinal tract.

### B. Lipid Particles

[0450] iRNAs, e.g., dsRNAs of in the invention may be fully encapsulated in a lipid formulation, e.g., a LNP, or other nucleic acid-lipid particle.

[0451] As used herein, the term “LNP” refers to a stable nucleic acid-lipid particle. LNPs typically contain a cationic lipid, a non-cationic lipid, and a lipid that prevents aggregation of the particle (e.g., a PEG-lipid conjugate). LNPs are extremely useful for systemic applications, as they exhibit extended circulation lifetimes following intravenous (i.v.) injection and accumulate at distal sites (e.g., sites physically separated from the administration site). LNPs include “pSPLP,” which include an encapsulated condensing agent-nucleic acid complex as set forth in PCT Publication No. WO 00/03683. The particles of the present invention typically have a mean diameter of about 50 nm to about 150 nm, more typically about 60 nm to about 130 nm, more typically about 70 nm to about 110 nm, most typically about 70 nm to about 90 nm, and are substantially nontoxic. In addition, the nucleic acids when present in the nucleic acid-lipid particles of the present invention are resistant in aqueous solution to degradation with a nuclease. Nucleic acid-lipid particles and their method of preparation are disclosed in, e.g., U.S. Pat. Nos. 5,976,567; 5,981,501; 6,534,484; 6,586,410; 6,815,432; U.S. Publication No. 2010/0324120 and PCT Publication No. WO 96/40964. In one embodiment, the lipid to drug ratio (mass/mass ratio) (e.g., lipid to dsRNA ratio) will be in the range of from about 1:1 to about 50:1, from about 1:1 to about 25:1, from about 3:1 to about 15:1, from about 4:1 to about 10:1, from about 5:1 to about 9:1, or about 6:1 to about 9:1. Ranges intermediate to the above recited ranges are also contemplated to be part of the invention.

[0452] The cationic lipid can be, for example, N,N-dioleyl-N,N-dimethylammonium chloride (DODAC), N,N-distearyl-N,N-dimethylammonium bromide (DDAB), N-(I-(2,3-diolcoyloxy)propyl)-N,N,N-trimethylammonium chloride (DOTAP), N-(I-(2,3-diolcyloxy)propyl)-N,N,N-trimethylammonium chloride (DOTMA), N,N-dimethyl-2,3-dioleyloxy)propylamine (DODMA), 1,2-DiLinoleyloxy-N,N-dimethylaminopropane (DLinDMA), 1,2-Dilinolenyloxy-N,N-dimethylaminopropane (DLenDMA), 1,2-Dilinolcylcarbamoyloxy-3-dimethylaminopropane (DLin-C-DAP), 1,2-Dilinoleyoxy-3-(dimethylamino)acetoxypropane (DLin-DAC), 1,2-Dilinoleyoxy-3-morpholinopropane (DLin-MA), 1,2-Dilinoleoyl-3-dimethylaminopropane (DLinDAP), 1,2-Dilinolcylthio-3-dimethylaminopropane (DLin-S-DMA), 1-Linoleoyl-2-linolcyloxy-3-dimethylaminopropane (DLin-2-DMAP), 1,2-Dilinoleyloxy-3-trimethylaminopropane chloride salt (DLin-TMA.Cl), 1,2-Dilinoleoyl-3-trimethylaminopropane chloride salt (DLin-TAP.Cl), 1,2-Dilinoleyloxy-3-(N-methylpiperazino)propane (DLin-MPZ), or 3-(N,N-Dilinoleylamino)-1,2-propanediol (DLinAP), 3-(N,N-Dioleylamino)-1,2-propanedio (DOAP), 1,2-Dilinolcyloxo-3-(2-N,N-dimethylamino)ethoxypropane (DLin-EG-DMA), 1,2-Dilinolenyloxy-N,N-dimethylaminopropane (DLinDMA), 2,2-Dilinoleyl-4-dimethylaminomethyl-[1,3]-dioxolane (DLin-K-DMA) or analogs thereof, (3aR,5s,6aS)-N,N-dimethyl-2,2-di((9Z,12Z)-octadeca-9,12-dienyl)tetrahydro-3aH-cyclopenta[d][1,3]dioxol-5-amine (ALN100), (6Z,9Z,28Z,31Z)-heptatriaconta-6,9,28,31-tetraen-19-yl 4-(dimethylamino)butanoate (MC3), 1,1′-(2-(4-(2-((2-(bis(2-hydroxydodecyl)amino)ethyl)(2-hydroxydodecyl)amino)ethyl)piperazin-1-yl)ethylazanediyl)didodecan-2-ol (Tech G1), or a mixture thereof. The cationic lipid can comprise from about 20 mol % to about 50 mol % or about 40 mol % of the total lipid present in the particle.

[0453] In another embodiment, the compound 2,2-Dilinoleyl-4-dimethylaminocthyl-[1,3]-dioxolane can be used to prepare lipid-siRNA nanoparticles. Synthesis of 2,2-Dilinoleyl-4-dimethylaminoethyl-[1,3]-dioxolane is described in U.S. provisional patent application No. 61/107,998 filed on Oct. 23, 2008, which is herein incorporated by reference.

[0454] In one embodiment, the lipid-siRNA particle includes 40% 2, 2-Dilinoleyl-4-dimethylaminoethyl-[1,3]-dioxolane: 10% DSPC: 40% Cholesterol: 10% PEG-C-DOMG (mole percent) with a particle size of 63.0±20 nm and a 0.027 siRNA/Lipid Ratio.

[0455] The ionizable/non-cationic lipid can be an anionic lipid or a neutral lipid including, but not limited to, distearoylphosphatidylcholine (DSPC), dioleoylphosphatidylcholine (DOPC), dipalmitoylphosphatidylcholine (DPPC), dioleoylphosphatidylglycerol (DOPG), dipalmitoylphosphatidylglycerol (DPPG), dioleoyl-phosphatidylethanolamine (DOPE), palmitoyloleoylphosphatidylcholine (POPC), palmitoyloleoylphosphatidylethanolamine (POPE), dioleoyl-phosphatidylethanolamine 4-(N-maleimidomethyl)-cyclohexane-1-carboxylate (DOPE-mal), dipalmitoyl phosphatidyl ethanolamine (DPPE), dimyristoylphosphoethanolamine (DMPE), distearoyl-phosphatidyl-ethanolamine (DSPE), 16-O-monomethyl PE, 16-O-dimethyl PE, 18-1-trans PE, 1-stearoyl-2-oleoyl-phosphatidyethanolamine (SOPE), cholesterol, or a mixture thereof. The non-cationic lipid can be from about 5 mol % to about 90 mol %, about 10 mol %, or about 58 mol % if cholesterol is included, of the total lipid present in the particle.

[0456] The conjugated lipid that inhibits aggregation of particles can be, for example, a polyethyleneglycol (PEG)-lipid including, without limitation, a PEG-diacylglycerol (DAG), a PEG-dialkyloxypropyl (DAA), a PEG-phospholipid, a PEG-ceramide (Cer), or a mixture thereof. The PEG-DAA conjugate can be, for example, a PEG-dilauryloxypropyl (Ci₂), a PEG-dimyristyloxypropyl (Ci₄), a PEG-dipalmityloxypropyl (Ci₆), or a PEG-distearyloxypropyl (C]₈). The conjugated lipid that prevents aggregation of particles can be from 0 mol % to about 20 mol % or about 2 mol % of the total lipid present in the particle.

[0457] In some embodiments, the nucleic acid-lipid particle further includes cholesterol at, e.g., about 10 mol % to about 60 mol % or about 48 mol % of the total lipid present in the particle.

[0458] In one embodiment, the lipidoid ND98·4HCl (MW 1487) (see U.S. patent application Ser. No. 12/056,230, filed Mar. 26, 2008, which is incorporated herein by reference), Cholesterol (Sigma-Aldrich), and PEG-Ceramide C16 (Avanti Polar Lipids) can be used to prepare lipid-dsRNA nanoparticles (i.e., LNP01 particles). Stock solutions of each in ethanol can be prepared as follows: ND98, 133 mg/ml; Cholesterol, 25 mg/ml, PEG-Ceramide C16, 100 mg/ml. The ND98, Cholesterol, and PEG-Ceramide C16 stock solutions can then be combined in a, e.g., 42:48:10 molar ratio. The combined lipid solution can be mixed with aqueous dsRNA (e.g., in sodium acetate pH 5) such that the final ethanol concentration is about 35-45% and the final sodium acetate concentration is about 100-300 mM. Lipid-dsRNA nanoparticles typically form spontaneously upon mixing. Depending on the desired particle size distribution, the resultant nanoparticle mixture can be extruded through a polycarbonate membrane (e.g., 100 nm cut-off) using, for example, a thermobarrel extruder, such as Lipex Extruder (Northern Lipids, Inc). In some cases, the extrusion step can be omitted. Ethanol removal and simultaneous buffer exchange can be accomplished by, for example, dialysis or tangential flow filtration. Buffer can be exchanged with, for example, phosphate buffered saline (PBS) at about pH 7, e.g., about pH 6.9, about pH 7.0, about pH 7.1, about pH 7.2, about pH 7.3, or about pH 7.4.

[chemical structure]

[0459] LNP01 formulations are described, e.g., in International Application Publication No. WO 2008/042973, which is hereby incorporated by reference.

[0460] Additional exemplary lipid-dsRNA formulations are described in Table A.

TABLE A

| | | cationic lipid/non-cationic |
|---|---|---|
| | | lipid/cholesterol/PEG-lipid |
| | Ionizable/Cationic Lipid | conjugate Lipid: siRNA ratio |
| SNALP-1 | 1,2-Dilinolenyloxy-N,N- | DLinDMA/DPPC/Cholesterol/PEG- |
| | dimethylaminopropane (DLinDMA) | cDMA |
| | | (57.1/7.1/34.4/1.4) |
| | | lipid:siRNA ~7:1 |
| 2-XTC | 2,2-Dilinoleyl-4-dimethylaminoethyl- | XTC/DPPC/Cholesterol/PEG-cDMA |
| | [1,3]-dioxolane (XTC) | 57.1/7.1/34.4/1.4 |
| | | lipid:siRNA ~7:1 |
| LNP05 | 2,2-Dilinoleyl-4-dimethylaminoethyl- | XTC/DSPC/Cholesterol/PEG-DMG |
| | [1,3]-dioxolane (XTC) | 57.5/7.5/31.5/3.5 |
| | | lipid:siRNA ~6:1 |
| LNP06 | 2,2-Dilinoleyl-4-dimethylaminoethyl- | XTC/DSPC/Cholesterol/PEG-DMG |
| | [1,3]-dioxolane (XTC) | 57.5/7.5/31.5/3.5 |
| | | lipid:siRNA ~11:1 |
| LNP07 | 2,2-Dilinoleyl-4-dimethylaminoethyl- | XTC/DSPC/Cholesterol/PEG-DMG |
| | [1,3]-dioxolane (XTC) | 60/7.5/31/1.5, |
| | | lipid:siRNA ~6:1 |
| LNP08 | 2,2-Dilinoleyl-4-dimethylaminoethyl- | XTC/DSPC/Cholesterol/PEG-DMG |
| | [1,3]-dioxolane (XTC) | 60/7.5/31/1.5, |
| | | lipid:siRNA ~11:1 |
| LNP09 | 2,2-Dilinoleyl-4-dimethylaminoethyl- | XTC/DSPC/Cholesterol/PEG-DMG |
| | [1,3]-dioxolane (XTC) | 50/10/38.5/1.5 |
| | | Lipid:siRNA 10:1 |
| LNP10 | (3aR,5s,6aS)-N,N-dimethyl-2,2- | ALN100/DSPC/Cholesterol/PEG-DMG |
| | di((9Z,12Z)-octadeca-9,12- | 50/10/38.5/1.5 |
| | dienyl)tetrahydro-3aH- | Lipid:siRNA 10:1 |
| | cyclopenta[d][1,3]dioxol-5-amine | |
| | (ALN100) | |
| LNP11 | (6Z,9Z,28Z,31Z)-heptatriaconta- | MC-3/DSPC/Cholesterol/PEG-DMG |
| | 6,9,28,31-tetraen-19-yl 4- | 50/10/38.5/1.5 |
| | (dimethylamino)butanoate (MC3) | Lipid:siRNA 10:1 |
| LNP12 | 1,1′-(2-(4-(2-((2-(bis(2- | Tech G1/DSPC/Cholesterol/PEG-DMG |
| | hydroxydodecyl)amino)ethyl)(2- | 50/10/38.5/1.5 |
| | hydroxydodecyl)amino)ethyl)piperazin- | Lipid:siRNA 10:1 |
| | 1-yl)ethylazanediyl)didodecan-2-ol | |
| | (Tech G1) | |
| LNP13 | XTC | XTC/DSPC/Chol/PEG-DMG |
| | | 50/10/38.5/1.5 |
| | | Lipid:siRNA:33:1 |
| LNP14 | MC3 | MC3/DSPC/Chol/PEG-DMG |
| | | 40/15/40/5 |
| | | Lipid:siRNA:11:1 |
| LNP15 | MC3 | MC3/DSPC/Chol/PEG-DSG/GalNAc- |
| | | PEG-DSG |
| | | 50/10/35/4.5/0.5 |
| | | Lipid:siRNA:11:1 |
| LNP16 | MC3 | MC3/DSPC/Chol/PEG-DMG |
| | | 50/10/38.5/1.5 |
| | | Lipid:siRNA:7:1 |
| LNP17 | MC3 | MC3/DSPC/Chol/PEG-DSG |
| | | 50/10/38.5/1.5 |
| | | Lipid:siRNA:10:1 |
| LNP18 | MC3 | MC3/DSPC/Chol/PEG-DMG |
| | | 50/10/38.5/1.5 |
| | | Lipid:siRNA:12:1 |
| LNP19 | MC3 | MC3/DSPC/Chol/PEG-DMG |
| | | 50/10/35/5 |
| | | Lipid:siRNA:8:1 |
| LNP20 | MC3 | MC3/DSPC/Chol/PEG-DPG |
| | | 50/10/38.5/1.5 |
| | | Lipid:siRNA:10:1 |
| LNP21 | C12-200 | C12-200/DSPC/Chol/PEG-DSG |
| | | 50/10/38.5/1.5 |
| | | Lipid:siRNA:7:1 |
| LNP22 | XTC | XTC/DSPC/Chol/PEG-DSG |
| | | 50/10/38.5/1.5 |
| | | Lipid:siRNA:10:1 |

DSPC: distearoylphosphatidylcholine
DPPC: dipalmitoylphosphatidylcholine
PEG-DMG: PEG-didimyristoyl glycerol (C14-PEG, or PEG-C14) (PEG with avg mol wt of 2000)
PEG-DSG: PEG-distyryl glycerol (C18-PEG, or PEG-C18) (PEG with avg mol wt of 2000)
PEG-cDMA: PEG-carbamoyl-1,2-dimyristyloxypropylamine (PEG with avg mol wt of 2000)
SNALP (1,2-Dilinolenyloxy-N,N-dimethylaminopropane (DLinDMA)) comprising formulations are described in International Publication No. WO2009/127060, filed Apr. 15, 2009, which is hereby incorporated by reference.
XTC comprising formulations are described in PCT Publication No. WO 2010/088537, the entire contents of which are hereby incorporated herein by reference.
MC3 comprising formulations are described, e.g., in U.S. Publication No. 2010/0324120, filed Jun. 10, 2010, the entire contents of which are hereby incorporated by reference.
ALNY-100 comprising formulations are described in PCT Publication No. WO 2010/054406, the entire contents of which are hereby incorporated herein by reference.
C12-200 comprising formulations are described in PCT Publication No. WO 2010/129709, the entire contents of which are hereby incorporated herein by reference.

[0461] Compositions and formulations for oral administration include powders or granules, microparticulates, nanoparticulates, suspensions or solutions in water or non-aqueous media, capsules, gel capsules, sachets, tablets or minitablets. Thickeners, flavoring agents, diluents, emulsifiers, dispersing aids or binders can be desirable. In some embodiments, oral formulations are those in which dsRNAs featured in the invention are administered in conjunction with one or more penetration enhancer surfactants and chelators. Suitable surfactants include fatty acids and/or esters or salts thereof, bile acids and/or salts thereof. Suitable bile acids/salts include chenodeoxycholic acid (CDCA) and ursodeoxychenodeoxycholic acid (UDCA), cholic acid, dehydrocholic acid, deoxycholic acid, glucholic acid, glycholic acid, glycodeoxycholic acid, taurocholic acid, taurodeoxycholic acid, sodium tauro-24,25-dihydro-fusidate and sodium glycodihydrofusidate. Suitable fatty acids include arachidonic acid, undecanoic acid, oleic acid, lauric acid, caprylic acid, capric acid, myristic acid, palmitic acid, stearic acid, linoleic acid, linolenic acid, dicaprate, tricaprate, monoolein, dilaurin, glyceryl 1-monocaprate, 1-dodecylazacycloheptan-2-one, an acylcarnitine, an acylcholine, or a monoglyceride, a diglyceride or a pharmaceutically acceptable salt thereof (e.g., sodium). In some embodiments, combinations of penetration enhancers are used, for example, fatty acids/salts in combination with bile acids/salts. One exemplary combination is the sodium salt of lauric acid, capric acid and UDCA. Further penetration enhancers include polyoxyethylene-9-lauryl ether, polyoxyethylene-20-cetyl ether. DsRNAs featured in the invention can be delivered orally, in granular form including sprayed dried particles, or complexed to form micro or nanoparticles. DsRNA complexing agents include poly-amino acids; polyimines; polyacrylates; polyalkylacrylates, polyoxethanes, polyalkylcyanoacrylates; cationized gelatins, albumins, starches, acrylates, polyethyleneglycols (PEG) and starches; polyalkylcyanoacrylates; DEAE-derivatized polyimines, pollulans, celluloses and starches. Suitable complexing agents include chitosan, N-trimethylchitosan, poly-L-lysine, polyhistidine, polyornithine, polyspermines, protamine, polyvinylpyridine, polythiodiethylaminomethylethylene P(TDAE), polyaminostyrene (e.g., p-amino), poly(methylcyanoacrylate), poly(ethylcyanoacrylate), poly(butylcyanoacrylate), poly(isobutylcyanoacrylate), poly(isohexylcynaoacrylate), DEAE-methacrylate, DEAE-hexylacrylate, DEAE-acrylamide, DEAE-albumin and DEAE-dextran, polymethylacrylate, polyhexylacrylate, poly(D,L-lactic acid), poly(DL-lactic-co-glycolic acid (PLGA), alginate, and polyethyleneglycol (PEG). Oral formulations for dsRNAs and their preparation are described in detail in U.S. Pat. No. 6,887,906, US Publn. No. 20030027780, and U.S. Pat. No. 6,747,014, each of which is incorporated herein by reference.

[0462] Compositions and formulations for parenteral, intraparenchymal (into the brain), intrathecal, intraventricular or intrahepatic administration can include sterile aqueous solutions which can also contain buffers, diluents and other suitable additives such as, but not limited to, penetration enhancers, carrier compounds and other pharmaceutically acceptable carriers or excipients.

[0463] Pharmaceutical compositions of the present invention include, but are not limited to, solutions, emulsions, and liposome-containing formulations. These compositions can be generated from a variety of components that include, but are not limited to, preformed liquids, self-emulsifying solids and self-emulsifying semisolids. Particularly preferred are formulations that target the liver when treating hepatic disorders such as hepatic carcinoma.

[0464] The pharmaceutical formulations of the present invention, which can conveniently be presented in unit dosage form, can be prepared according to conventional techniques well known in the pharmaceutical industry. Such techniques include the step of bringing into association the active ingredients with the pharmaceutical carrier(s) or excipient(s). In general, the formulations are prepared by uniformly and intimately bringing into association the active ingredients with liquid carriers or finely divided solid carriers or both, and then, if necessary, shaping the product.

[0465] The compositions of the present invention can be formulated into any of many possible dosage forms such as, but not limited to, tablets, capsules, gel capsules, liquid syrups, soft gels, suppositories, and enemas. The compositions of the present invention can also be formulated as suspensions in aqueous, non-aqueous or mixed media. Aqueous suspensions can further contain substances which increase the viscosity of the suspension including, for example, sodium carboxymethylcellulose, sorbitol and/or dextran. The suspension can also contain stabilizers.

### C. Additional Formulations

i. Emulsions

[0466] The compositions of the present invention can be prepared and formulated as emulsions. Emulsions are typically heterogeneous systems of one liquid dispersed in another in the form of droplets usually exceeding 0.1 μm in diameter (see e.g., Ansel's Pharmaceutical Dosage Forms and Drug Delivery Systems, Allen, L V., Popovich N G., and Ansel H C., 2004, Lippincott Williams & Wilkins (8th ed.), New York, NY; Idson, in Pharmaceutical Dosage Forms, Lieberman, Rieger and Banker (Eds.), 1988, Marcel Dekker, Inc., New York, N.Y., volume 1, p. 199; Rosoff, in Pharmaceutical Dosage Forms, Lieberman, Rieger and Banker (Eds.), 1988, Marcel Dekker, Inc., New York, N.Y., Volume 1, p. 245; Block in Pharmaceutical Dosage Forms, Lieberman, Rieger and Banker (Eds.), 1988, Marcel Dekker, Inc., New York, N.Y., volume 2, p. 335; Higuchi et al., in Remington's Pharmaceutical Sciences, Mack Publishing Co., Easton, Pa., 1985, p. 301). Emulsions are often biphasic systems comprising two immiscible liquid phases intimately mixed and dispersed with each other. In general, emulsions can be of either the water-in-oil (w/o) or the oil-in-water (o/w) variety. When an aqueous phase is finely divided into and dispersed as minute droplets into a bulk oily phase, the resulting composition is called a water-in-oil (w/o) emulsion. Alternatively, when an oily phase is finely divided into and dispersed as minute droplets into a bulk aqueous phase, the resulting composition is called an oil-in-water (o/w) emulsion. Emulsions can contain additional components in addition to the dispersed phases, and the active drug which can be present as a solution in either the aqueous phase, oily phase or itself as a separate phase. Pharmaceutical excipients such as emulsifiers, stabilizers, dyes, and anti-oxidants can also be present in emulsions as needed. Pharmaceutical emulsions can also be multiple emulsions that are comprised of more than two phases such as, for example, in the case of oil-in-water-in-oil (o/w/o) and water-in-oil-in-water (w/o/w) emulsions. Such complex formulations often provide certain advantages that simple binary emulsions do not. Multiple emulsions in which individual oil droplets of an o/w emulsion enclose small water droplets constitute a w/o/w emulsion. Likewise a system of oil droplets enclosed in globules of water stabilized in an oily continuous phase provides an o/w/o emulsion.

[0467] Emulsions are characterized by little or no thermodynamic stability. Often, the dispersed or discontinuous phase of the emulsion is well dispersed into the external or continuous phase and maintained in this form through the means of emulsifiers or the viscosity of the formulation. Either of the phases of the emulsion can be a semisolid or a solid, as is the case of emulsion-style ointment bases and creams. Other means of stabilizing emulsions entail the use of emulsifiers that can be incorporated into either phase of the emulsion. Emulsifiers can broadly be classified into four categories: synthetic surfactants, naturally occurring emulsifiers, absorption bases, and finely dispersed solids (see e.g., Ansel's Pharmaceutical Dosage Forms and Drug Delivery Systems, Allen, L V., Popovich N G., and Ansel H C., 2004, Lippincott Williams & Wilkins (8th ed.), New York, NY; Idson, in Pharmaceutical Dosage Forms, Lieberman, Rieger and Banker (Eds.), 1988, Marcel Dekker, Inc., New York, N.Y., volume 1, p. 199).

[0468] Synthetic surfactants, also known as surface active agents, have found wide applicability in the formulation of emulsions and have been reviewed in the literature (see e.g., Ansel's Pharmaceutical Dosage Forms and Drug Delivery Systems, Allen, L V., Popovich N G., and Ansel H C., 2004, Lippincott Williams & Wilkins (8th ed.), New York, NY; Rieger, in Pharmaceutical Dosage Forms, Lieberman, Rieger and Banker (Eds.), 1988, Marcel Dekker, Inc., New York, N.Y., volume 1, p. 285; Idson, in Pharmaceutical Dosage Forms, Lieberman, Rieger and Banker (Eds.), Marcel Dekker, Inc., New York, N.Y., 1988, volume 1, p. 199). Surfactants are typically amphiphilic and comprise a hydrophilic and a hydrophobic portion. The ratio of the hydrophilic to the hydrophobic nature of the surfactant has been termed the hydrophile/lipophile balance (HLB) and is a valuable tool in categorizing and selecting surfactants in the preparation of formulations. Surfactants can be classified into different classes based on the nature of the hydrophilic group: nonionic, anionic, cationic and amphoteric (see e.g., Ansel's Pharmaceutical Dosage Forms and Drug Delivery Systems, Allen, L V., Popovich N G., and Ansel H C., 2004, Lippincott Williams & Wilkins (8th ed.), New York, NY Rieger, in Pharmaceutical Dosage Forms, Lieberman, Rieger and Banker (Eds.), 1988, Marcel Dekker, Inc., New York, N.Y., volume 1, p. 285).

[0469] Naturally occurring emulsifiers used in emulsion formulations include lanolin, beeswax, phosphatides, lecithin and acacia. Absorption bases possess hydrophilic properties such that they can soak up water to form w/o emulsions yet retain their semisolid consistencies, such as anhydrous lanolin and hydrophilic petrolatum. Finely divided solids have also been used as good emulsifiers especially in combination with surfactants and in viscous preparations. These include polar inorganic solids, such as heavy metal hydroxides, nonswelling clays such as bentonite, attapulgite, hectorite, kaolin, montmorillonite, colloidal aluminum silicate and colloidal magnesium aluminum silicate, pigments and nonpolar solids such as carbon or glyceryl tristearate.

[0470] A large variety of non-emulsifying materials are also included in emulsion formulations and contribute to the properties of emulsions. These include fats, oils, waxes, fatty acids, fatty alcohols, fatty esters, humectants, hydrophilic colloids, preservatives and antioxidants (Block, in Pharmaceutical Dosage Forms, Lieberman, Rieger and Banker (Eds.), 1988, Marcel Dekker, Inc., New York, N.Y., volume 1, p. 335; Idson, in Pharmaceutical Dosage Forms, Lieberman, Rieger and Banker (Eds.), 1988, Marcel Dekker, Inc., New York, N.Y., volume 1, p. 199).

[0471] Hydrophilic colloids or hydrocolloids include naturally occurring gums and synthetic polymers such as polysaccharides (for example, acacia, agar, alginic acid, carrageenan, guar gum, karaya gum, and tragacanth), cellulose derivatives (for example, carboxymethylcellulose and carboxypropylcellulose), and synthetic polymers (for example, carbomers, cellulose ethers, and carboxyvinyl polymers). These disperse or swell in water to form colloidal solutions that stabilize emulsions by forming strong interfacial films around the dispersed-phase droplets and by increasing the viscosity of the external phase.

[0472] Since emulsions often contain a number of ingredients such as carbohydrates, proteins, sterols and phosphatides that can readily support the growth of microbes, these formulations often incorporate preservatives. Commonly used preservatives included in emulsion formulations include methyl paraben, propyl paraben, quaternary ammonium salts, benzalkonium chloride, esters of p-hydroxybenzoic acid, and boric acid. Antioxidants are also commonly added to emulsion formulations to prevent deterioration of the formulation. Antioxidants used can be free radical scavengers such as tocopherols, alkyl gallates, butylated hydroxyanisole, butylated hydroxytoluene, or reducing agents such as ascorbic acid and sodium metabisulfite, and antioxidant synergists such as citric acid, tartaric acid, and lecithin.

[0473] The application of emulsion formulations via dermatological, oral and parenteral routes and methods for their manufacture have been reviewed in the literature (see e.g., Ansel's Pharmaceutical Dosage Forms and Drug Delivery Systems, Allen, L V., Popovich N G., and Ansel H C., 2004, Lippincott Williams & Wilkins (8th ed.), New York, NY; Idson, in Pharmaceutical Dosage Forms, Lieberman, Rieger and Banker (Eds.), 1988, Marcel Dekker, Inc., New York, N.Y., volume 1, p. 199). Emulsion formulations for oral delivery have been very widely used because of case of formulation, as well as efficacy from an absorption and bioavailability standpoint (see e.g., Ansel's Pharmaceutical Dosage Forms and Drug Delivery Systems, Allen, L V., Popovich N G., and Ansel H C., 2004, Lippincott Williams & Wilkins (8th ed.), New York, NY; Rosoff, in Pharmaceutical Dosage Forms, Lieberman, Rieger and Banker (Eds.), 1988, Marcel Dekker, Inc., New York, N.Y., volume 1, p. 245; Idson, in Pharmaceutical Dosage Forms, Lieberman, Rieger and Banker (Eds.), 1988, Marcel Dekker, Inc., New York, N.Y., volume 1, p. 199). Mineral-oil base laxatives, oil-soluble vitamins and high fat nutritive preparations are among the materials that have commonly been administered orally as o/w emulsions.

ii. Microemulsions

[0474] In one embodiment of the present invention, the compositions of iRNAs and nucleic acids are formulated as microemulsions. A microemulsion can be defined as a system of water, oil and amphiphile which is a single optically isotropic and thermodynamically stable liquid solution (see e.g., Ansel's Pharmaceutical Dosage Forms and Drug Delivery Systems, Allen, L V., Popovich N G., and Ansel H C., 2004, Lippincott Williams & Wilkins (8th ed.), New York, NY; Rosoff, in Pharmaceutical Dosage Forms, Lieberman, Rieger and Banker (Eds.), 1988, Marcel Dekker, Inc., New York, N.Y., volume 1, p. 245). Typically microemulsions are systems that are prepared by first dispersing an oil in an aqueous surfactant solution and then adding a sufficient amount of a fourth component, generally an intermediate chain-length alcohol to form a transparent system. Therefore, microemulsions have also been described as thermodynamically stable, isotropically clear dispersions of two immiscible liquids that are stabilized by interfacial films of surface-active molecules (Leung and Shah, in: Controlled Release of Drugs: Polymers and Aggregate Systems, Rosoff, M., Ed., 1989, VCH Publishers, New York, pages 185-215). Microemulsions commonly are prepared via a combination of three to five components that include oil, water, surfactant, cosurfactant and electrolyte. Whether the microemulsion is of the water-in-oil (w/o) or an oil-in-water (o/w) type is dependent on the properties of the oil and surfactant used and on the structure and geometric packing of the polar heads and hydrocarbon tails of the surfactant molecules (Schott, in Remington's Pharmaceutical Sciences, Mack Publishing Co., Easton, Pa., 1985, p. 271).

[0475] The phenomenological approach utilizing phase diagrams has been extensively studied and has yielded a comprehensive knowledge, to one skilled in the art, of how to formulate microemulsions (see e.g., Ansel's Pharmaceutical Dosage Forms and Drug Delivery Systems, Allen, L V., Popovich N G., and Ansel H C., 2004, Lippincott Williams & Wilkins (8th ed.), New York, NY; Rosoff, in Pharmaceutical Dosage Forms, Lieberman, Rieger and Banker (Eds.), 1988, Marcel Dekker, Inc., New York, N.Y., volume 1, p. 245; Block, in Pharmaceutical Dosage Forms, Lieberman, Rieger and Banker (Eds.), 1988, Marcel Dekker, Inc., New York, N.Y., volume 1, p. 335). Compared to conventional emulsions, microemulsions offer the advantage of solubilizing water-insoluble drugs in a formulation of thermodynamically stable droplets that are formed spontaneously.

[0476] Surfactants used in the preparation of microemulsions include, but are not limited to, ionic surfactants, non-ionic surfactants, Brij 96, polyoxyethylene oleyl ethers, polyglycerol fatty acid esters, tetraglycerol monolaurate (ML310), tetraglycerol monooleate (MO310), hexaglycerol monooleate (PO310), hexaglycerol pentaoleate (PO500), decaglycerol monocaprate (MCA750), decaglycerol monooleate (MO750), decaglycerol sequioleate (SO750), decaglycerol decaoleate (DAO750), alone or in combination with cosurfactants. The cosurfactant, usually a short-chain alcohol such as ethanol, 1-propanol, and 1-butanol, serves to increase the interfacial fluidity by penetrating into the surfactant film and consequently creating a disordered film because of the void space generated among surfactant molecules. Microemulsions can, however, be prepared without the use of cosurfactants and alcohol-free self-emulsifying microemulsion systems are known in the art. The aqueous phase can typically be, but is not limited to, water, an aqueous solution of the drug, glycerol, PEG300, PEG400, polyglycerols, propylene glycols, and derivatives of ethylene glycol. The oil phase can include, but is not limited to, materials such as Captex 300, Captex 355, Capmul MCM, fatty acid esters, medium chain (C8-C12) mono, di, and tri-glycerides, polyoxyethylated glyceryl fatty acid esters, fatty alcohols, polyglycolized glycerides, saturated polyglycolized C8-C10 glycerides, vegetable oils and silicone oil.

[0477] Microemulsions are particularly of interest from the standpoint of drug solubilization and the enhanced absorption of drugs. Lipid based microemulsions (both o/w and w/o) have been proposed to enhance the oral bioavailability of drugs, including peptides (see e.g., U.S. Pat. Nos. 6,191,105; 7,063,860; 7,070,802; 7,157,099; Constantinides et al., Pharmaceutical Research, 1994, 11, 1385-1390; Ritschel, Meth. Find. Exp. Clin. Pharmacol., 1993, 13, 205). Microemulsions afford advantages of improved drug solubilization, protection of drug from enzymatic hydrolysis, possible enhancement of drug absorption due to surfactant-induced alterations in membrane fluidity and permeability, case of preparation, case of oral administration over solid dosage forms, improved clinical potency, and decreased toxicity (see e.g., U.S. Pat. Nos. 6,191,105; 7,063,860; 7,070,802; 7,157,099; Constantinides et al., Pharmaceutical Research, 1994, 11, 1385; Ho et al., J. Pharm. Sci., 1996, 85, 138-143). Often microemulsions can form spontaneously when their components are brought together at ambient temperature. This can be particularly advantageous when formulating thermolabile drugs, peptides or iRNAs. Microemulsions have also been effective in the transdermal delivery of active components in both cosmetic and pharmaceutical applications. It is expected that the microemulsion compositions and formulations of the present invention will facilitate the increased systemic absorption of iRNAs and nucleic acids from the gastrointestinal tract, as well as improve the local cellular uptake of iRNAs and nucleic acids.

[0478] Microemulsions of the present invention can also contain additional components and additives such as sorbitan monostearate (Grill 3), Labrasol, and penetration enhancers to improve the properties of the formulation and to enhance the absorption of the iRNAs and nucleic acids of the present invention. Penetration enhancers used in the microemulsions of the present invention can be classified as belonging to one of five broad categories—surfactants, fatty acids, bile salts, chelating agents, and non-chelating non-surfactants (Lee et al., Critical Reviews in Therapeutic Drug Carrier Systems, 1991, p. 92). Each of these classes has been discussed above.

iii. Microparticles

[0479] An iRNA agent of the invention may be incorporated into a particle, e.g., a microparticle. Microparticles can be produced by spray-drying, but may also be produced by other methods including lyophilization, evaporation, fluid bed drying, vacuum drying, or a combination of these techniques.

iv. Penetration Enhancers

[0480] In one embodiment, the present invention employs various penetration enhancers to effect the efficient delivery of nucleic acids, particularly iRNAs, to the skin of animals. Most drugs are present in solution in both ionized and nonionized forms. However, usually only lipid soluble or lipophilic drugs readily cross cell membranes. It has been discovered that even non-lipophilic drugs can cross cell membranes if the membrane to be crossed is treated with a penetration enhancer. In addition to aiding the diffusion of non-lipophilic drugs across cell membranes, penetration enhancers also enhance the permeability of lipophilic drugs.

[0481] Penetration enhancers can be classified as belonging to one of five broad categories, i.e., surfactants, fatty acids, bile salts, chelating agents, and non-chelating non-surfactants (see e.g., Malmsten, M. Surfactants and polymers in drug delivery, Informa Health Care, New York, NY, 2002; Lee et al., Critical Reviews in Therapeutic Drug Carrier Systems, 1991, p. 92). Each of the above mentioned classes of penetration enhancers are described below in greater detail.

[0482] Surfactants (or “surface-active agents”) are chemical entities which, when dissolved in an aqueous solution, reduce the surface tension of the solution or the interfacial tension between the aqueous solution and another liquid, with the result that absorption of iRNAs through the mucosa is enhanced. In addition to bile salts and fatty acids, these penetration enhancers include, for example, sodium lauryl sulfate, polyoxyethylene-9-lauryl ether and polyoxyethylene-20-cetyl ether) (see e.g., Malmsten, M. Surfactants and polymers in drug delivery, Informa Health Care, New York, NY, 2002; Lee et al., Critical Reviews in Therapeutic Drug Carrier Systems, 1991, p. 92); and perfluorochemical emulsions, such as FC-43. Takahashi et al., J. Pharm. Pharmacol., 1988, 40, 252).

[0483] Various fatty acids and their derivatives which act as penetration enhancers include, for example, oleic acid, lauric acid, capric acid (n-decanoic acid), myristic acid, palmitic acid, stearic acid, linoleic acid, linolenic acid, dicaprate, tricaprate, monoolein (1-monooleoyl-rac-glycerol), dilaurin, caprylic acid, arachidonic acid, glycerol 1-monocaprate, 1-dodecylazacycloheptan-2-one, acylcarnitines, acylcholines, C1-20 alkyl esters thereof (e.g., methyl, isopropyl and t-butyl), and mono- and di-glycerides thereof (i.e., oleate, laurate, caprate, myristate, palmitate, stearate, linoleate, etc.) (see e.g., Touitou, E., et al. Enhancement in Drug Delivery, CRC Press, Danvers, M A, 2006; Lee et al., Critical Reviews in Therapeutic Drug Carrier Systems, 1991, p. 92; Muranishi, Critical Reviews in Therapeutic Drug Carrier Systems, 1990, 7, 1-33; El Hariri et al., J. Pharm. Pharmacol., 1992, 44, 651-654).

[0484] The physiological role of bile includes the facilitation of dispersion and absorption of lipids and fat-soluble vitamins (see e.g., Malmsten, M. Surfactants and polymers in drug delivery, Informa Health Care, New York, NY, 2002; Brunton, Chapter 38 in: Goodman & Gilman's The Pharmacological Basis of Therapeutics, 9th Ed., Hardman et al. Eds., McGraw-Hill, New York, 1996, pp. 934-935). Various natural bile salts, and their synthetic derivatives, act as penetration enhancers. Thus the term “bile salts” includes any of the naturally occurring components of bile as well as any of their synthetic derivatives. Suitable bile salts include, for example, cholic acid (or its pharmaceutically acceptable sodium salt, sodium cholate), dehydrocholic acid (sodium dehydrocholate), deoxycholic acid (sodium deoxycholate), glucholic acid (sodium glucholatc), glycholic acid (sodium glycocholate), glycodeoxycholic acid (sodium glycodeoxycholate), taurocholic acid (sodium taurocholate), taurodeoxycholic acid (sodium taurodeoxycholate), chenodeoxycholic acid (sodium chenodeoxycholate), ursodeoxycholic acid (UDCA), sodium tauro-24,25-dihydro-fusidate (STDHF), sodium glycodihydrofusidate and polyoxyethylene-9-lauryl ether (POE) (see e.g., Malmsten, M. Surfactants and polymers in drug delivery, Informa Health Care, New York, NY, 2002; Lec et al., Critical Reviews in Therapeutic Drug Carrier Systems, 1991, page 92; Swinyard, Chapter 39 In: Remington's Pharmaceutical Sciences, 18th Ed., Gennaro, cd., Mack Publishing Co., Easton, Pa., 1990, pages 782-783; Muranishi, Critical Reviews in Therapeutic Drug Carrier Systems, 1990, 7, 1-33; Yamamoto et al., J. Pharm. Exp. Ther., 1992, 263, 25; Yamashita et al., J. Pharm. Sci., 1990, 79, 579-583).

[0485] Chelating agents, as used in connection with the present invention, can be defined as compounds that remove metallic ions from solution by forming complexes therewith, with the result that absorption of iRNAs through the mucosa is enhanced. With regards to their use as penetration enhancers in the present invention, chelating agents have the added advantage of also serving as DNase inhibitors, as most characterized DNA nucleases require a divalent metal ion for catalysis and are thus inhibited by chelating agents (Jarrett, J. Chromatogr., 1993, 618, 315-339). Suitable chelating agents include but are not limited to disodium ethylenediaminetetraacetate (EDTA), citric acid, salicylates (e.g., sodium salicylate, 5-methoxysalicylate and homovanilate), N-acyl derivatives of collagen, laureth-9 and N-amino acyl derivatives of beta-diketones (enamines) (see e.g., Katdare, A. et al., Excipient development for pharmaceutical, biotechnology, and drug delivery, CRC Press, Danvers, M A, 2006; Lee et al., Critical Reviews in Therapeutic Drug Carrier Systems, 1991, page 92; Muranishi, Critical Reviews in Therapeutic Drug Carrier Systems, 1990, 7, 1-33; Buur et al., J. Control Rel., 1990, 14, 43-51).

[0486] As used herein, non-chelating non-surfactant penetration enhancing compounds can be defined as compounds that demonstrate insignificant activity as chelating agents or as surfactants but that nonetheless enhance absorption of iRNAs through the alimentary mucosa (see e.g., Muranishi, Critical Reviews in Therapeutic Drug Carrier Systems, 1990, 7, 1-33). This class of penetration enhancers includes, for example, unsaturated cyclic ureas, 1-alkyl- and 1-alkenylazacyclo-alkanone derivatives (Lee et al., Critical Reviews in Therapeutic Drug Carrier Systems, 1991, page 92); and non-steroidal anti-inflammatory agents such as diclofenac sodium, indomethacin and phenylbutazone (Yamashita et al., J. Pharm. Pharmacol., 1987, 39, 621-626).

[0487] Agents that enhance uptake of iRNAs at the cellular level can also be added to the pharmaceutical and other compositions of the present invention. For example, cationic lipids, such as lipofectin (Junichi et al, U.S. Pat. No. 5,705,188), cationic glycerol derivatives, and polycationic molecules, such as polylysine (Lollo et al., PCT Application WO 97/30731), are also known to enhance the cellular uptake of dsRNAs. Examples of commercially available transfection reagents include, for example Lipofectamine™ (Invitrogen; Carlsbad, CA), Lipofectamine 2000™ (Invitrogen; Carlsbad, CA), 293Fectin™ (Invitrogen; Carlsbad, CA), Cellfectin™ (Invitrogen; Carlsbad, CA), DMRIE-C™ (Invitrogen; Carlsbad, CA), FreeStyle™ MAX (Invitrogen; Carlsbad, CA), Lipofcctamine™ 2000 CD (Invitrogen; Carlsbad, CA), Lipofectamine™ (Invitrogen; Carlsbad, CA), iRNAMAX (Invitrogen; Carlsbad, CA), Oligofectaminc™ (Invitrogen; Carlsbad, CA), Optifect™ (Invitrogen; Carlsbad, CA), X-tremeGENE Q2 Transfection Reagent (Roche; Grenzacherstrasse, Switzerland), DOTAP Liposomal Transfection Reagent (Grenzacherstrasse, Switzerland), DOSPER Liposomal Transfection Reagent (Grenzacherstrasse, Switzerland), or Fugene (Grenzacherstrasse, Switzerland), Transfectam® Reagent (Promega; Madison, WI), TransFast™ Transfection Reagent (Promega; Madison, WI), Tfx™-20 Reagent (Promega; Madison, WI), Tfx™-50 Reagent (Promega; Madison, WI), DreamFect™ (OZ Biosciences; Marseille, France), EcoTransfect (OZ Biosciences; Marseille, France), TransPassª D1 Transfection Reagent (New England Biolabs; Ipswich, MA, USA), LyoVec™/LipoGen™ (Invitrogen; San Diego, CA, USA), PerFectin Transfection Reagent (Genlantis; San Diego, CA, USA), NeuroPORTER Transfection Reagent (Genlantis; San Diego, CA, USA), GencPORTER Transfection reagent (Genlantis; San Diego, CA, USA), GenePORTER 2 Transfection reagent (Genlantis; San Diego, CA, USA), Cytofectin Transfection Reagent (Genlantis; San Diego, CA, USA), BaculoPORTER Transfection Reagent (Genlantis; San Diego, CA, USA), TroganPORTER™ transfection Reagent (Genlantis; San Diego, CA, USA), RiboFect (Bioline; Taunton, MA, USA), PlasFect (Bioline; Taunton, MA, USA), UniFECTOR (B-Bridge International; Mountain View, CA, USA), SureFECTOR (B-Bridge International; Mountain View, CA, USA), or HiFect™ (B-Bridge International, Mountain View, CA, USA), among others.

[0488] Other agents can be utilized to enhance the penetration of the administered nucleic acids, including glycols such as ethylene glycol and propylene glycol, pyrrols such as 2-pyrrol, azones, and terpenes such as limonene and menthone.

v. Carriers

[0489] Certain compositions of the present invention also incorporate carrier compounds in the formulation. As used herein, “carrier compound” or “carrier” can refer to a nucleic acid, or analog thereof, which is inert (i.e., does not possess biological activity per se) but is recognized as a nucleic acid by in vivo processes that reduce the bioavailability of a nucleic acid having biological activity by, for example, degrading the biologically active nucleic acid or promoting its removal from circulation. The coadministration of a nucleic acid and a carrier compound, typically with an excess of the latter substance, can result in a substantial reduction of the amount of nucleic acid recovered in the liver, kidney or other extracirculatory reservoirs, presumably due to competition between the carrier compound and the nucleic acid for a common receptor. For example, the recovery of a partially phosphorothioate dsRNA in hepatic tissue can be reduced when it is coadministered with polyinosinic acid, dextran sulfate, polycytidic acid or 4-acetamido-4′isothiocyano-stilbene-2,2′-disulfonic acid (Miyao et al., DsRNA Res. Dev., 1995, 5, 115-121; Takakura et al., DsRNA & Nucl. Acid Drug Dev., 1996, 6, 177-183.

vi. Excipients

[0490] In contrast to a carrier compound, a “pharmaceutical carrier” or “excipient” is a pharmaceutically acceptable solvent, suspending agent or any other pharmacologically inert vehicle for delivering one or more nucleic acids to an animal. The excipient can be liquid or solid and is selected, with the planned manner of administration in mind, so as to provide for the desired bulk, consistency, etc., when combined with a nucleic acid and the other components of a given pharmaceutical composition. Typical pharmaceutical carriers include, but are not limited to, binding agents (e.g., pregelatinized maize starch, polyvinylpyrrolidone or hydroxypropyl methylcellulose, etc.); fillers (e.g., lactose and other sugars, microcrystalline cellulose, pectin, gelatin, calcium sulfate, ethyl cellulose, polyacrylates or calcium hydrogen phosphate, etc.); lubricants (e.g., magnesium stearate, talc, silica, colloidal silicon dioxide, stearic acid, metallic stearates, hydrogenated vegetable oils, corn starch, polyethylene glycols, sodium benzoate, sodium acetate, etc.); disintegrants (e.g., starch, sodium starch glycolate, etc.); and wetting agents (e.g., sodium lauryl sulphate, etc).

[0491] Pharmaceutically acceptable organic or inorganic excipients suitable for non-parenteral administration which do not deleteriously react with nucleic acids can also be used to formulate the compositions of the present invention. Suitable pharmaceutically acceptable carriers include, but are not limited to, water, salt solutions, alcohols, polyethylene glycols, gelatin, lactose, amylose, magnesium stearate, talc, silicic acid, viscous paraffin, hydroxymethylcellulose, polyvinylpyrrolidone and the like.

[0492] Formulations for topical administration of nucleic acids can include sterile and non-sterile aqueous solutions, non-aqueous solutions in common solvents such as alcohols, or solutions of the nucleic acids in liquid or solid oil bases. The solutions can also contain buffers, diluents and other suitable additives. Pharmaceutically acceptable organic or inorganic excipients suitable for non-parenteral administration which do not deleteriously react with nucleic acids can be used.

[0493] Suitable pharmaceutically acceptable excipients include, but are not limited to, water, salt solutions, alcohol, polyethylene glycols, gelatin, lactose, amylose, magnesium stearate, talc, silicic acid, viscous paraffin, hydroxymethylcellulose, polyvinylpyrrolidone and the like.

vii. Other Components

[0494] The compositions of the present invention can additionally contain other adjunct components conventionally found in pharmaceutical compositions, at their art-established usage levels. Thus, for example, the compositions can contain additional, compatible, pharmaceutically-active materials such as, for example, antipruritics, astringents, local anesthetics or anti-inflammatory agents, or can contain additional materials useful in physically formulating various dosage forms of the compositions of the present invention, such as dyes, flavoring agents, preservatives, antioxidants, opacifiers, thickening agents and stabilizers. However, such materials, when added, should not unduly interfere with the biological activities of the components of the compositions of the present invention. The formulations can be sterilized and, if desired, mixed with auxiliary agents, e.g., lubricants, preservatives, stabilizers, wetting agents, emulsifiers, salts for influencing osmotic pressure, buffers, colorings, flavorings and/or aromatic substances and the like which do not deleteriously interact with the nucleic acid(s) of the formulation.

[0495] Aqueous suspensions can contain substances which increase the viscosity of the suspension including, for example, sodium carboxymethylcellulose, sorbitol and/or dextran. The suspension can also contain stabilizers.

[0496] In some embodiments, pharmaceutical compositions featured in the invention include (a) one or more iRNA compounds and (b) one or more agents which function by a non-iRNA mechanism and which are useful in treating a hemolytic disorder. Examples of such agents include, but are not limited to an anti-inflammatory agent, anti-steatosis agent, anti-viral, and/or anti-fibrosis agent.

[0497] In addition, other substances commonly used to protect the liver, such as silymarin, can also be used in conjunction with the iRNAs described herein. Other agents useful for treating liver diseases include telbivudine, entecavir, and protease inhibitors such as telaprevir and other disclosed, for example, in Tung et al., U.S. Application Publication Nos. 2005/0148548, 2004/0167116, and 2003/0144217; and in Hale et al., U.S. Application Publication No. 2004/0127488.

[0498] Toxicity and therapeutic efficacy of such compounds can be determined by standard pharmaceutical procedures in cell cultures or experimental animals, e.g., for determining the LD50 (the dose lethal to 50% of the population) and the ED50 (the dose therapeutically effective in 50% of the population). The dose ratio between toxic and therapeutic effects is the therapeutic index and it can be expressed as the ratio LD50/ED50. Compounds that exhibit high therapeutic indices are preferred.

[0499] The data obtained from cell culture assays and animal studies can be used in formulating a range of dosage for use in humans. The dosage of compositions featured herein in the invention lies generally within a range of circulating concentrations that include the ED50 with little or no toxicity. The dosage can vary within this range depending upon the dosage form employed and the route of administration utilized. For any compound used in the methods featured in the invention, the therapeutically effective dose can be estimated initially from cell culture assays. A dose can be formulated in animal models to achieve a circulating plasma concentration range of the compound or, when appropriate, of the polypeptide product of a target sequence (e.g., achieving a decreased concentration of the polypeptide) that includes the IC50 (i.e., the concentration of the test compound which achieves a half-maximal inhibition of symptoms) as determined in cell culture. Such information can be used to more accurately determine useful doses in humans. Levels in plasma can be measured, for example, by high performance liquid chromatography.

[0500] In addition to their administration, as discussed above, the iRNAs featured in the invention can be administered in combination with other known agents effective in treatment of pathological processes mediated by TTR expression. In any event, the administering physician can adjust the amount and timing of iRNA administration on the basis of results observed using standard measures of efficacy known in the art or described herein.

### VII. Methods for Inhibiting TTR Expression

[0501] The present invention also provides methods of inhibiting expression of a transthyretin (TTR) in a cell. The methods include contacting a cell with an RNAi agent, e.g., double stranded RNAi agent, in an amount effective to inhibit expression of TTR in the cell, thereby inhibiting expression of TTR in the cell.

[0502] Contacting of a cell with an RNAi agent, e.g., a double stranded RNAi agent, may be done in vitro or in vivo. Contacting a cell in vivo with the RNAi agent includes contacting a cell or group of cells within a subject, e.g., a human subject, with the RNAi agent. Combinations of in vitro and in vivo methods of contacting a cell or group of cells are also possible. Contacting a cell or a group of cells may be direct or indirect, as discussed above. Furthermore, contacting a cell or a group of cells may be accomplished via a targeting ligand, including any ligand described herein or known in the art. In preferred embodiments, the targeting ligand is a carbohydrate moiety, e.g., a GalNAc₃ ligand, or any other ligand that directs the RNAi agent to a site of interest, e.g., the liver of a subject.

[0503] The term “inhibiting,” as used herein, is used interchangeably with “reducing,” “silencing,” “downregulating”, “suppressing”, and other similar terms, and includes any level of inhibition. Preferably inhibiting includes a statistically significant or clinically significant inhibition.

[0504] The phrase “inhibiting expression of a TTR” is intended to refer to inhibition of expression of any TTR gene (such as, e.g., a mouse TTR gene, a rat TTR gene, a monkey TTR gene, or a human TTR gene) as well as variants or mutants of a TTR gene. Thus, the TTR gene may be a wild-type TTR gene, a mutant TTR gene (such as a mutant TTR gene giving rise to amyloid deposition), or a transgenic TTR gene in the context of a genetically manipulated cell, group of cells, or organism.

[0505] “Inhibiting expression of a TTR gene” includes any level of inhibition of a TTR gene, e.g., at least partial suppression of the expression of a TTR gene. The expression of the TTR gene may be assessed based on the level, or the change in the level, of any variable associated with TTR gene expression, e.g., TTR mRNA level, TTR protein level, or the number or extent of amyloid deposits. This level may be assessed in an individual cell or in a group of cells, including, for example, a sample derived from a subject.

[0506] Inhibition may be assessed by a decrease in an absolute or relative level of one or more variables that are associated with TTR expression compared with a control level. The control level may be any type of control level that is utilized in the art, e.g., a pre-dose baseline level, or a level determined from a similar subject, cell, or sample that is untreated or treated with a control (such as, e.g., buffer only control or inactive agent control).

[0507] In some embodiments of the methods of the invention, expression of a TTR gene is inhibited by at least about 5%, at least about 10%, at least about 15%, at least about 20%, at least about 25%, at least about 30%, at least about 35%, at least about 40%, at least about 45%, at least about 50%, at least about 55%, at least about 60%, at least about 65%, at least about 70%, at least about 75%, at least about 80%, at least about 85%, at least about 90%, at least about 91%, at least about 92%, at least about 93%, at least about 94%, at least about 95%, at least about 96%, at least about 97%, at least about 98%, at least about 99% %, or to below the level of detection of the assay. In some embodiments, the inhibition of expression of a TTRgene results in normalization of the level of the TTR gene such that the difference between the level before treatment and a normal control level is reduced by at least 30%, 35%, 40%, 45%, 50%, 55%, 60%, 65%, 70%, 75%, 80%, 85%, 90%, or 95%. In some embodiments, the inhibition is a clinically relevant inhibition.

[0508] Inhibition of the expression of a TTR gene may be manifested by a reduction of the amount of mRNA expressed by a first cell or group of cells (such cells may be present, for example, in a sample derived from a subject) in which a TTR gene is transcribed and which has or have been treated (e.g., by contacting the cell or cells with an RNAi agent of the invention, or by administering an RNAi agent of the invention to a subject in which the cells are or were present) such that the expression of a TTR gene is inhibited, as compared to a second cell or group of cells substantially identical to the first cell or group of cells but which has not or have not been so treated (control cell(s)). In preferred embodiments, the inhibition is assessed by expressing the level of mRNA in treated cells as a percentage of the level of mRNA in control cells, using the following formula:

$$\frac{( mRNA in control cells ) - ( mRNA in treated cells )}{( mRNA in control cells )} * 100 \%$$

[0509] Alternatively, inhibition of the expression of a TTR gene may be assessed in terms of a reduction of a parameter that is functionally linked to TTR gene expression, e.g., TTR protein expression, retinol binding protein level, vitamin A level, or presence of amyloid deposits comprising TTR. TTR gene silencing may be determined in any cell expressing TTR, either constitutively or by genomic engineering, and by any assay known in the art. The liver is the major site of TTR expression. Other significant sites of expression include the choroid plexus, retina and pancreas.

[0510] Inhibition of the expression of a TTR protein may be manifested by a reduction in the level of the TTR protein that is expressed by a cell or group of cells (e.g., the level of protein expressed in a sample derived from a subject). As explained above for the assessment of mRNA suppression, the inhibition of protein expression levels in a treated cell or group of cells may similarly be expressed as a percentage of the level of protein in a control cell or group of cells.

[0511] A control cell or group of cells that may be used to assess the inhibition of the expression of a TTR gene includes a cell or group of cells that has not yet been contacted with an RNAi agent of the invention. For example, the control cell or group of cells may be derived from an individual subject (e.g., a human or animal subject) prior to treatment of the subject with an RNAi agent.

[0512] The level of TTR mRNA that is expressed by a cell or group of cells, or the level of circulating TTR mRNA, may be determined using any method known in the art for assessing mRNA expression. In one embodiment, the level of expression of TTR in a sample is determined by detecting a transcribed polynucleotide, or portion thereof, e.g., mRNA of the TTR gene. RNA may be extracted from cells using RNA extraction techniques including, for example, using acid phenol/guanidine isothiocyanate extraction (RNAzol B; Biogenesis), RNeasy RNA preparation kits (Qiagen) or PAXgene (PrcAnalytix, Switzerland). Typical assay formats utilizing ribonucleic acid hybridization include nuclear run-on assays, RT-PCR, RNase protection assays (Melton et al., Nuc. Acids Res. 12:7035), Northern blotting, in situ hybridization, and microarray analysis. Circulating TTR mRNA may be detected using methods the described in PCT/US2012/043584, the entire contents of which are hereby incorporated herein by reference.

[0513] In one embodiment, the level of expression of TTR is determined using a nucleic acid probe. The term “probe”, as used herein, refers to any molecule that is capable of selectively binding to a specific TTR. Probes can be synthesized by one of skill in the art, or derived from appropriate biological preparations. Probes may be specifically designed to be labeled. Examples of molecules that can be utilized as probes include, but are not limited to, RNA, DNA, proteins, antibodies, and organic molecules.

[0514] Isolated mRNA can be used in hybridization or amplification assays that include, but are not limited to, Southern or Northern analyses, polymerase chain reaction (PCR) analyses and probe arrays. One method for the determination of mRNA levels involves contacting the isolated mRNA with a nucleic acid molecule (probe) that can hybridize to TTR mRNA. In one embodiment, the mRNA is immobilized on a solid surface and contacted with a probe, for example by running the isolated mRNA on an agarose gel and transferring the mRNA from the gel to a membrane, such as nitrocellulose. In an alternative embodiment, the probe(s) are immobilized on a solid surface and the mRNA is contacted with the probe(s), for example, in an Affymetrix gene chip array. A skilled artisan can readily adapt known mRNA detection methods for use in determining the level of TTR mRNA.

[0515] An alternative method for determining the level of expression of TTR in a sample involves the process of nucleic acid amplification and/or reverse transcriptase (to prepare cDNA) of for example mRNA in the sample, e.g., by RT-PCR (the experimental embodiment set forth in Mullis, 1987, U.S. Pat. No. 4,683,202), ligase chain reaction (Barany (1991) Proc. Natl. Acad. Sci. USA 88:189-193), self sustained sequence replication (Guatelli et al. (1990) Proc. Natl. Acad. Sci. USA 87:1874-1878), transcriptional amplification system (Kwoh et al. (1989) Proc. Natl. Acad. Sci. USA 86:1173-1177), Q-Beta Replicase (Lizardi et al. (1988) Bio/Technology 6:1197), rolling circle replication (Lizardi et al., U.S. Pat. No. 5,854,033) or any other nucleic acid amplification method, followed by the detection of the amplified molecules using techniques well known to those of skill in the art. These detection schemes are especially useful for the detection of nucleic acid molecules if such molecules are present in very low numbers. In particular aspects of the invention, the level of expression of TTR is determined by quantitative fluorogenic RT-PCR (i.e., the TaqMan™ System).

[0516] The expression levels of TTR mRNA may be monitored using a membrane blot (such as used in hybridization analysis such as Northern, Southern, dot, and the like), or microwells, sample tubes, gels, beads or fibers (or any solid support comprising bound nucleic acids). Sec U.S. Pat. Nos. 5,770,722, 5,874,219, 5,744,305, 5,677,195 and 5,445,934, which are incorporated herein by reference. The determination of TTR expression level may also comprise using nucleic acid probes in solution.

[0517] In preferred embodiments, the level of mRNA expression is assessed using branched DNA (bDNA) assays or real time PCR (qPCR). The use of these methods is described and exemplified in the Examples presented herein.

[0518] The level of TTR protein expression may be determined using any method known in the art for the measurement of protein levels. Such methods include, for example, electrophoresis, capillary electrophoresis, high performance liquid chromatography (HPLC), thin layer chromatography (TLC), hyperdiffusion chromatography, fluid or gel precipitin reactions, absorption spectroscopy, a colorimetric assays, spectrophotometric assays, flow cytometry, immunodiffusion (single or double), immunoelectrophoresis, Western blotting, radioimmunoassay (RIA), enzyme-linked immunosorbent assays (ELISAs), immunofluorescent assays, electrochemiluminescence assays, and the like.

[0519] In some embodiments, the efficacy of the methods of the invention can be monitored by detecting or monitoring a reduction in an amyloid TTR deposit. Reducing an amyloid TTR deposit, as used herein, includes any decrease in the size, number, or severity of TTR deposits, or to a prevention or reduction in the formation of TTR deposits, within an organ or area of a subject, as may be assessed in vitro or in vivo using any method known in the art. For example, some methods of assessing amyloid deposits are described in Gertz, M. A. & Rajukumar, S. V. (Editors) (2010), Amyloidosis: Diagnosis and Treatment, New York: Humana Press. Methods of assessing amyloid deposits may include biochemical analyses, as well as visual or computerized assessment of amyloid deposits, as made visible, e.g., using immunohistochemical staining, fluorescent labeling, light microscopy, electron microscopy, fluorescence microscopy, or other types of microscopy. Invasive or noninvasive imaging modalities, including, e.g., CT, PET, or NMR/MRI imaging may be employed to assess amyloid deposits.

[0520] The methods of the invention may reduce TTR deposits in any number of tissues or regions of the body including but not limited to the heart, liver, spleen, esophagus, stomach, intestine (ileum, duodenum and colon), brain, sciatic nerve, dorsal root ganglion, kidney and retina.

[0521] The term “sample” as used herein refers to a collection of similar fluids, cells, or tissues isolated from a subject, as well as fluids, cells, or tissues present within a subject. Examples of biological fluids include blood, serum and serosal fluids, plasma, lymph, urine, cerebrospinal fluid, saliva, ocular fluids, and the like. Tissue samples may include samples from tissues, organs or localized regions. For example, samples may be derived from particular organs, parts of organs, or fluids or cells within those organis. In certain embodiments, samples may be derived from the liver (e.g., whole liver or certain segments of liver or certain types of cells in the liver, such as, e.g., hepatocytes), the retina or parts of the retina (e.g., retinal pigment epithelium), the central nervous system or parts of the central nervous system (e.g., ventricles or choroid plexus), or the pancreas or certain cells or parts of the pancreas. In preferred embodiments, a “sample derived from a subject” refers to blood drawn from the subject or plasma derived therefrom. In further embodiments, a “sample derived from a subject” refers to liver tissue or retinal tissue derived from the subject.

[0522] In some embodiments of the methods of the invention, the RNAi agent is administered to a subject such that the RNAi agent is delivered to a specific site within the subject. The inhibition of expression of TTR may be assessed using measurements of the level or change in the level of TTR mRNA or TTR protein in a sample derived from fluid or tissue from the specific site within the subject. In preferred embodiments, the site is selected from the group consisting of liver, choroid plexus, retina, and pancreas. The site may also be a subsection or subgroup of cells from any one of the aforementioned sites (e.g., hepatocytes or retinal pigment epithelium). The site may also include cells that express a particular type of receptor (e.g., hepatocytes that express the asialogycloprotein receptor).

### VIII. Methods for Treating or Preventing a TTR-Associated Disease

[0523] The present invention also provides methods for treating or preventing a TTR-associated disease in a subject. The methods include administering to the subject a therapeutically effective amount or prophylactically effective amount of an RNAi agent of the invention.

[0524] As used herein, a “subject” is an animal, such as a mammal, including a primate (such as a human, a non-human primate, e.g., a monkey, and a chimpanzee), a non-primate (such as a cow, a pig, a camel, a llama, a horse, a goat, a rabbit, a sheep, a hamster, a guinea pig, a cat, a dog, a rat, a mouse, a horse, and a whale), or a bird (e.g., a duck or a goose). A subject may include a transgenic organism.

[0525] In an embodiment, the subject is a human, such as a human being treated or assessed for a disease, disorder or condition that would benefit from reduction in TTR gene expression; a human at risk for a disease, disorder or condition that would benefit from reduction in TTR gene expression; a human having a disease, disorder or condition that would benefit from reduction in TTR gene expression; and/or human being treated for a disease, disorder or condition that would benefit from reduction in TTR gene expression, as described herein.

[0526] In some embodiments, the subject is suffering from a TTR-associated disease. In other embodiments, the subject is a subject at risk for developing a TTR-associated disease, e.g., a subject with a TTR gene mutation that is associated with the development of a TTR associated disease (e.g., before the onset of signs or symptoms suggesting the development of TTR amyloidosis), a subject with a family history of TTR-associated disease (e.g., before the onset of signs or symptoms suggesting the development of TTR amyloidosis), or a subject who has signs or symptoms suggesting the development of TTR amyloidosis.

[0527] A “TTR-associated disease,” as used herein, includes any disease caused by or associated with the formation of amyloid deposits in which the fibril precurosors consist of variant or wild-type TTR protein. Mutant and wild-type TTR give rise to various forms of amyloid deposition (amyloidosis). Amyloidosis involves the formation and aggregation of misfolded proteins, resulting in extracellular deposits that impair organ function. Climical syndromes associated with TTR aggregation include, for example, senile systemic amyloidosis (SSA); systemic familial amyloidosis; familial amyloidotic polyneuropathy (FAP); familial amyloidotic cardiomyopathy (FAC); and leptomeningeal amyloidosis, also known as leptomeningeal or meningocerebrovascular amyloidosis, central nervous system (CNS) amyloidosis, or amyloidosis VII form.

[0528] In one embodiment, the RNAi agents of the invention are administered to subjects suffering from familial amyloidotic cardiomyopathy (FAC). In another embodiment, the RNAi agents of the invention are administered to subjects suffering from FAC with a mixed phenotype, i.e., a subject having both cardiac and neurological impairments. In yet another embodiment, the RNAi agents of the invention are administered to subjects suffering from FAP with a mixed phenotype, i.e., a subject having both neurological and cardiac impairments. In one embodiment, the RNAi agents of the invention are administered to subjects suffering from FAP that has been treated with an orthotopic liver transplantation (OLT). In another embodiment, the RNAi agents of the invention are administered to subjects suffering from senile systemic amyloidosis (SSA). In other embodiments of the methods of the invention, RNAi agents of the invention are administered to subjects suffering from familial amyloidotic cardiomyopathy (FAC) and senile systemic amyloidosis (SSA). Normal-sequence TTR causes cardiac amyloidosis in people who are elderly and is termed senile systemic amyloidosis (SSA) (also called senile cardiac amyloidosis (SCA) or cardiac amyloidosis). SSA often is accompanied by microscopic deposits in many other organs. TTR mutations accelerate the process of TTR amyloid formation and are the most important risk factor for the development of clinically significant TTR amyloidosis (also called ATTR (amyloidosis-transthyretin type)). More than 85 amyloidogenic TTR variants are known to cause systemic familial amyloidosis.

[0529] In some embodiments of the methods of the invention, RNAi agents of the invention are administered to subjects suffering from transthyretin (TTR)-related familial amyloidotic polyneuropathy (FAP). Such subjects may suffer from ocular manifestations, such as vitreous opacity and glaucoma. It is known to one of skill in the art that amyloidogenic transthyretin (ATTR) synthesized by retinal pigment epithelium (RPE) plays important roles in the progression of ocular amyloidosis. Previous studies have shown that panretinal laser photocoagulation, which reduced the RPE cells, prevented the progression of amyloid deposition in the vitreous, indicating that the effective suppression of ATTR expression in RPE may become a novel therapy for ocular amyloidosis (see, e.g., Kawaji, T., et al., Ophthalmology. (2010) 117:552-555). The methods of the invention are useful for treatment of ocular manifestations of TTR related FAP, e.g., ocular amyloidosis. The RNAi agent can be delivered in a manner suitable for targeting a particular tissue, such as the eye. Modes of ocular delivery include retrobulbar, subcutaneous eyelid, subconjunctival, subtenon, anterior chamber or intravitreous injection (or internal injection or infusion). Specific formulations for ocular delivery include eye drops or ointments.

[0530] Another TTR-associated disease is hyperthyroxinemia, also known as “dystransthyretinemic hyperthyroxinemia” or “dysprealbuminemic hyperthyroxinemia”. This type of hyperthyroxinemia may be secondary to an increased association of thyroxine with TTR due to a mutant TTR molecule with increased affinity for thyroxinc. See, e.g., Moses et al. (1982) J. Clin. Invest., 86, 2025-2033.

[0531] The RNAi agents of the invention may be administered to a subject using any mode of administration known in the art, including, but not limited to subcutaneous, intravenous, intramuscular, intraocular, intrabronchial, intrapleural, intraperitoneal, intraarterial, lymphatic, cerebrospinal, and any combinations thereof.

[0532] In preferred embodiments, the agents are administered to the subject subcutaneously. In some embodiments, a subject is administered a single dose of an RNAi agent via subcutaneous injection, e.g., abdominal, thigh, or upper arm injection. In other embodiments, a subject is administered a split dose of an RNAi agent via subcutaneous injection. In one embodiment, the split dose of the RNAi agent is administered to the subject via subcutaneous injection at two different anatomical locations on the subject. For example, the subject may be subcutaneously injected with a split dose of about 250 mg (e.g., about half of a 500 mg dose) in the right arm and about 250 mg in the left arm. In some embodiments of the invention, the subcutaneous administration is self-administration via, e.g., a pre-filled syringe or auto-injector syringe. In some embodiments, a dose of the RNAi agent for subcutaneous administration is contained in a volume of less than or equal to one ml of, e.g., a pharmaceutically acceptable carrier.

[0533] In some embodiments, the administration is via a depot injection. A depot injection may release the RNAi agent in a consistent way over a prolonged time period. Thus, a depot injection may reduce the frequency of dosing needed to obtain a desired effect, e.g., a desired inhibition of TTR, or a therapeutic or prophylactic effect. A depot injection may also provide more consistent serum concentrations. Depot injections may include subcutaneous injections or intramuscular injections. In preferred embodiments, the depot injection is a subcutaneous injection.

[0534] In some embodiments, the administration is via a pump. The pump may be an external pump or a surgically implanted pump. In certain embodiments, the pump is a subcutaneously implanted osmotic pump. In other embodiments, the pump is an infusion pump. An infusion pump may be used for intravenous, subcutaneous, arterial, or epidural infusions. In preferred embodiments, the infusion pump is a subcutaneous infusion pump. In other embodiments, the pump is a surgically implanted pump that delivers the RNAi agent to the liver.

[0535] In embodiments in which the RNAi agent is administered via a subcutaneous infusion pump, a single dose of the RNAi agent may be administered to the subject over a period of time of about 45 minutes to about 5 minutes, e.g., about 45 minutes, about 40 minutes, about 35 minutes, about 30 minutes, about 25 minutes, about 20 minutes, about 15 minutes, about 10 minutes, or about 5 minutes.

[0536] Other modes of administration include epidural, intracerebral, intracerebroventricular, nasal administration, intraarterial, intracardiac, intraosscous infusion, intrathecal, and intravitreal, and pulmonary. The mode of administration may be chosen based upon whether local or systemic treatment is desired and based upon the area to be treated. The route and site of administration may be chosen to enhance targeting.

[0537] In some embodiments, the RNAi agent is administered to a subject in an amount effective to inhibit TTR expression in a cell within the subject. The amount effective to inhibit TTR expression in a cell within a subject may be assessed using methods discussed above, including methods that involve assessment of the inhibition of TTR mRNA, TTR protein, or related variables, such as amyloid deposits.

[0538] In some embodiments, the RNAi agent is administered to a subject in a therapeutically or prophylactically effective amount.

[0539] “Therapeutically effective amount,” as used herein, is intended to include the amount of an RNAi agent that, when administered to a patient for treating a TTR associated disease, is sufficient to effect treatment of the disease (e.g., by diminishing, ameliorating or maintaining the existing disease or one or more symptoms of disease). The “therapeutically effective amount” may vary depending on the RNAi agent, how the agent is administered, the disease and its severity and the history, age, weight, family history, genetic makeup, stage of pathological processes mediated by TTR expression, the types of preceding or concomitant treatments, if any, and other individual characteristics of the patient to be treated.

[0540] “Prophylactically effective amount,” as used herein, is intended to include the amount of an RNAi agent that, when administered to a subject who does not yet experience or display symptoms of a TTR-associated disease, but who may be predisposed to the disease, is sufficient to prevent or ameliorate the disease or one or more symptoms of the disease. Symptoms that may be ameliorated include sensory neuropathy (e.g., paresthesia, hypesthesia in distal limbs), autonomic neuropathy (e.g., gastrointestinal dysfunction, such as gastric ulcer, or orthostatic hypotension), motor neuropathy, seizures, dementia, myelopathy, polyneuropathy, carpal tunnel syndrome, autonomic insufficiency, cardiomyopathy, vitreous opacities, renal insufficiency, nephropathy, substantially reduced mBMI (modified Body Mass Index), cranial nerve dysfunction, and corneal lattice dystrophy. Ameliorating the disease includes slowing the course of the disease or reducing the severity of later-developing disease. The “prophylactically effective amount” may vary depending on the RNAi agent, how the agent is administered, the degree of risk of disease, and the history, age, weight, family history, genetic makeup, the types of preceding or concomitant treatments, if any, and other individual characteristics of the patient to be treated.

[0541] A “therapeutically-effective amount” or “prophylacticaly effective amount” also includes an amount of an RNAi agent that produces some desired local or systemic effect at a reasonable benefit/risk ratio applicable to any treatment. RNAi agents employed in the methods of the present invention may be administered in a sufficient amount to produce a reasonable benefit/risk ratio applicable to such treatment.

[0542] As used herein, the phrases “therapeutically effective amount” and “prophylactically effective amount” also include an amount that provides a benefit in the treatment, prevention, or management of pathological processes or symptom(s) of pathological processes mediated by TTR expression. Symptoms of TTR amyloidosis include sensory neuropathy (e.g. paresthesia, hypesthesia in distal limbs), autonomic neuropathy (e.g., gastrointestinal dysfunction, such as gastric ulcer, or orthostatic hypotension), motor neuropathy, seizures, dementia, myclopathy, polyneuropathy, carpal tunnel syndrome, autonomic insufficiency, cardiomyopathy, vitreous opacities, renal insufficiency, nephropathy, substantially reduced mBMI (modified Body Mass Index), cranial nerve dysfunction, and corneal lattice dystrophy.

[0543] In one embodiment, for example, when the subject has FAP, FAP with mixed phenotype, FAC with mixed phenotype, or FAP and has had an OLT, treatment of the subject with a dsRNA agent of the invention slows the progression of neuropathy. In another embodiment, for example, when the subject has FAP, FAP with mixed phenotype, FAC with mixed phenotype, SSA, or FAP and has had an OLT, treatment of the subject with a dsRNA agent of the invention slows the progression of neuropathy and cardiomyopathy.

[0544] For example, in one embodiment, the methods of the invention slow, reduce or arrest neurological impairment. Any suitable measure of neurological impairment can be used to determine whether a subject has reduced, slowed, or arrested neurological impairment.

[0545] One suitable measure is a Neuropathy Impairment Score (NIS). NIS refers to a scoring system that measures weakness, sensation, and reflexes, especially with respect to peripheral neuropathy. The NIS score evaluates a standard group of muscles for weakness (1 is 25% weak, 2 is 50% weak, 3 is 75% weak, 3.25 is movement against gravity, 3.5 is movement with gravity eliminated, 3.75 is muscle flicker without movement, and 4 is paralyzed), a standard group of muscle stretch reflexes (0 is normal, 1 is decreased, 2 is absent), and touch-pressure, vibration, joint position and motion, and pinprick (all graded on index finger and big toe: 0 is normal, 1 is decreased, 2 is absent). Evaluations are corrected for age, gender, and physical fitness.

[0546] In one embodiment, the methods of the invention reduce a NIS by at least 10%. In other embodiments, the methods of the invention result in a reduction of NIS by at least 5, 10, 15, 20, 25, 30, 40, or by at least 50%. In other embodiments, the methods arrest an increasing NIS score, e.g., the method results in a 0% increase of the NIS score. In yet other embodiments, the methods of the invention slow the rate at which an NIS score increase, e.g., the rate of increase of an NIS score in a subject treated with an RNAi agent of the invention as compared to the rate of increase of an NIS score in a subject that is not treated with an RNAi agent of the invention.

[0547] Methods for determining an NIS in a human subject are well known to one of skill in the art and can be found in, for example, Dyck, P J et al., (1997) Neurology 1997. 49 (1): pgs. 229-239); Dyck P J. (1988) Muscle Nerve. January; 11(1):21-32.

[0548] Another suitable measurement of neurological impairment is a Modified Neuropathy Impairment Score (mNIS+7). As known to one of ordinary skill in the art, mNIS+7 refers to a clinical exam-based assessment of neurologic impairment (NIS) combined with electrophysiologic measures of small and large nerve fiber function (NCS and QST), and measurement of autonomic function (postural blood pressure). The mNIS+7 score is a modification of the NIS+7 score (which represents NIS plus seven tests). NIS+7 analyzes weakness and muscle stretch reflexes. Five of the seven tests include attributes of nerve conduction. These attributes are the peroneal nerve compound muscle action potential amplitude, motor nerve conduction velocity and motor nerve distal latency (MNDL), tibial MNDL, and sural sensory nerve action potential amplitudes. These values are corrected for variables of age, gender, height, and weight. The remaining two of the seven tests include vibratory detection threshold and heart rate decrease with deep breathing.

[0549] The mNIS+7 score modifies NIS+7 to take into account the use of Smart Somatotopic Quantitative Sensation Testing, new autonomic assessments, and the use of compound muscle action potential of amplitudes of the ulnar, peroneal, and tibial nerves, and sensory nerve action potentials of the ulnar and sural nerves (Suanprasert, N. et al., (2014) J. Neurol. Sci., 344 (1-2): pgs. 121-128).

[0550] In one embodiment, the methods of the invention reduce an mNIS+7 by at least 10%. In other embodiments, the methods of the invention result in a reduction of an mNIS+7 score by at least 5, 10, 15, 20, 25, 30, 40, or by at least 50%. In other embodiments, the methods arrest an increasing mNIS+7, e.g., the method results in a 0% increase of the mNIS+7. In yet other embodiments, the methods of the invention slow the rate at which an NIS+7 score increase, e.g., the rate of increase of an NIS+7 score in a subject treated with an RNAi agent of the invention as compared to the rate of increase of an NIS+7 score in a subject that is not treated with an RNAi agent of the invention.

[0551] The therapeutic and prophylactic methods of the present invention may also improve other clinical parameters, such awalking ability, in the subject being treated. For example, during or following a treatment period a subject may have an increased exercise capacity or activity.

[0552] Any suitable measure of exercise capacity can be used to determine whether a subject has an increased exercise capacity or activity. One suitable measure is a 6-minute walk test (6MWT), which measures how far the subject can walk in 6 minutes, i.e., the 6-minute walk distance (6MWD). In one embodiment, the methods of the invention provide to the subject an increase from baseline in the 6MWD by at least about 10 minutes, e.g., about 10, 15, 20, or about 30 minutes.

[0553] A therapeutically effective amount and prophylactically effective amount of an RNAi agent of the invention also includes an amount that improves one or more quality of life parameters versus baseline, for example an increase in score on at least one of the SF-36® health survey functional scales; and/or an increased longevity; and/or decreased hospitilization.

[0554] Any suitable measure quality of life may be used. For example, the SF-36® health survey provides a self-reporting, multi-item scale measuring eight health parameters: physical functioning, role limitations due to physical health problems, bodily pain, general health, vitality (energy and fatigue), social functioning, role limitations due to emotional problems, and mental health (psychological distress and psychological well-being). The survey also provides a physical component summary and a mental component summary. In one embodiment, the methods of the invention provide to the subject an improvement versus baseline in at least one of the SF-36 physical health related parameters (physical health, role-physical, bodily pain and/or general health) and/or in at least one of the SF-36 mental health related parameters (vitality, social functioning, role-emotional and/or mental health). Such an improvement can take the form of an increase of at least 1, for example at least 2 or at least 3 points, on the scale for any one or more parameters.

[0555] The methods of the present invention may also improve the prognosis of the subject being treated. For example, the methods of the invention may provide to the subject a reduction in probability of a clinical worsening event during the treatment period.

[0556] The dose of an RNAi agent that is administered to a subject may be tailored to balance the risks and benefits of a particular dose, for example, to achieve a desired level of TTR gene suppression (as assessed, e.g., based on TTR mRNA suppression, TTR protein expression, or a reduction in an amyloid deposit, as defined above) or a desired therapeutic or prophylactic effect, while at the same time avoiding undesirable side effects.

[0557] In one embodiment, an iRNA agent of the invention is administered to a subject as a weight-based dose. A “weight-based dose” (e.g., a dose in mg/kg) is a dose of the iRNA agent that will change depending on the subject's weight. In another embodiment, an iRNA agent is administered to a subject as a fixed dose. A “fixed dose” (e.g., a dose in mg) means that one dose of an iRNA agent is used for all subjects regardless of any specific subject-related factors, such as weight. In one particular embodiment, a fixed dose of an iRNA agent of the invention is based on a predetermined weight or age.

[0558] Subjects can be administered a therapeutic amount of iRNA, such as about 0.01 mg/kg, 0.02 mg/kg, 0.03 mg/kg, 0.04 mg/kg, 0.05 mg/kg, 0.1 mg/kg, 0.15 mg/kg, 0.2 mg/kg, 0.25 mg/kg, 0.3 mg/kg, 0.35 mg/kg, 0.4 mg/kg, 0.45 mg/kg, 0.5 mg/kg, 0.55 mg/kg, 0.6 mg/kg, 0.65 mg/kg, 0.7 mg/kg, 0.75 mg/kg, 0.8 mg/kg, 0.85 mg/kg, 0.9 mg/kg, 0.95 mg/kg, 1.0 mg/kg, 1.1 mg/kg, 1.2 mg/kg, 1.25 mg/kg, 1.3 mg/kg, 1.4 mg/kg, 1.5 mg/kg, 1.6 mg/kg, 1.7 mg/kg, 1.8 mg/kg, 1.9 mg/kg, 2.0 mg/kg, 2.1 mg/kg, 2.2 mg/kg, 2.3 mg/kg, 2.4 mg/kg, 2.5 mg/kg dsRNA, 2.6 mg/kg dsRNA, 2.7 mg/kg dsRNA, 2.8 mg/kg dsRNA, 2.9 mg/kg dsRNA, 3.0 mg/kg dsRNA, 3.1 mg/kg dsRNA, 3.2 mg/kg dsRNA, 3.3 mg/kg dsRNA, 3.4 mg/kg dsRNA, 3.5 mg/kg dsRNA, 3.6 mg/kg dsRNA, 3.7 mg/kg dsRNA, 3.8 mg/kg dsRNA, 3.9 mg/kg dsRNA, 4.0 mg/kg dsRNA, 4.1 mg/kg dsRNA, 4.2 mg/kg dsRNA, 4.3 mg/kg dsRNA, 4.4 mg/kg dsRNA, 4.5 mg/kg dsRNA, 4.6 mg/kg dsRNA, 4.7 mg/kg dsRNA, 4.8 mg/kg dsRNA, 4.9 mg/kg dsRNA, 5.0 mg/kg dsRNA, 5.1 mg/kg dsRNA, 5.2 mg/kg dsRNA, 5.3 mg/kg dsRNA, 5.4 mg/kg dsRNA, 5.5 mg/kg dsRNA, 5.6 mg/kg dsRNA, 5.7 mg/kg dsRNA, 5.8 mg/kg dsRNA, 5.9 mg/kg dsRNA, 6.0 mg/kg dsRNA, 6.1 mg/kg dsRNA, 6.2 mg/kg dsRNA, 6.3 mg/kg dsRNA, 6.4 mg/kg dsRNA, 6.5 mg/kg dsRNA, 6.6 mg/kg dsRNA, 6.7 mg/kg dsRNA, 6.8 mg/kg dsRNA, 6.9 mg/kg dsRNA, 7.0 mg/kg dsRNA, 7.1 mg/kg dsRNA, 7.2 mg/kg dsRNA, 7.3 mg/kg dsRNA, 7.4 mg/kg dsRNA, 7.5 mg/kg dsRNA, 7.6 mg/kg dsRNA, 7.7 mg/kg dsRNA, 7.8 mg/kg dsRNA, 7.9 mg/kg dsRNA, 8.0 mg/kg dsRNA, 8.1 mg/kg dsRNA, 8.2 mg/kg dsRNA, 8.3 mg/kg dsRNA, 8.4 mg/kg dsRNA, 8.5 mg/kg dsRNA, 8.6 mg/kg dsRNA, 8.7 mg/kg dsRNA, 8.8 mg/kg dsRNA, 8.9 mg/kg dsRNA, 9.0 mg/kg dsRNA, 9.1 mg/kg dsRNA, 9.2 mg/kg dsRNA, 9.3 mg/kg dsRNA, 9.4 mg/kg dsRNA, 9.5 mg/kg dsRNA, 9.6 mg/kg dsRNA, 9.7 mg/kg dsRNA, 9.8 mg/kg dsRNA, 9.9 mg/kg dsRNA, 9.0 mg/kg dsRNA, 10 mg/kg dsRNA, 15 mg/kg dsRNA, 20 mg/kg dsRNA, 25 mg/kg dsRNA, 30 mg/kg dsRNA, 35 mg/kg dsRNA, 40 mg/kg dsRNA, 45 mg/kg dsRNA, or about 50 mg/kg dsRNA. Values and ranges intermediate to the recited values are also intended to be part of this invention.

[0559] In certain embodiments, for example, when a composition of the invention comprises a dsRNA as described herein and a lipid, subjects can be administered a therapeutic amount of iRNA, such as about 0.01 mg/kg to about 10 mg/kg, about 0.01 mg/kg to about 10 mg/kg, about 0.05 mg/kg to about 5 mg/kg, about 0.05 mg/kg to about 10 mg/kg, about 0.1 mg/kg to about 5 mg/kg, about 0.1 mg/kg to about 10 mg/kg, about 0.2 mg/kg to about 5 mg/kg, about 0.2 mg/kg to about 10 mg/kg, about 0.3 mg/kg to about 5 mg/kg, about 0.3 mg/kg to about 10 mg/kg, about 0.4 mg/kg to about 5 mg/kg, about 0.4 mg/kg to about 10 mg/kg, about 0.5 mg/kg to about 5 mg/kg, about 0.5 mg/kg to about 10 mg/kg, about 1 mg/kg to about 5 mg/kg, about 1 mg/kg to about 10 mg/kg, about 1.5 mg/kg to about 5 mg/kg, about 1.5 mg/kg to about 10 mg/kg, about 2 mg/kg to about 2.5 mg/kg, about 2 mg/kg to about 10 mg/kg, about 3 mg/kg to about 5 mg/kg, about 3 mg/kg to about 10 mg/kg, about 3.5 mg/kg to about 5 mg/kg, about 4 mg/kg to about 5 mg/kg, about 4.5 mg/kg to about 5 mg/kg, about 4 mg/kg to about 10 mg/kg, about 4.5 mg/kg to about 10 mg/kg, about 5 mg/kg to about 10 mg/kg, about 5.5 mg/kg to about 10 mg/kg, about 6 mg/kg to about 10 mg/kg, about 6.5 mg/kg to about mg/kg, about 7 mg/kg to about 10 mg/kg, about 7.5 mg/kg to about 10 mg/kg, about 8 mg/kg to about 10 mg/kg, about 8.5 mg/kg to about 10 mg/kg, about 9 mg/kg to about 10 mg/kg, or about 9.5 mg/kg to about 10 mg/kg. Values and ranges intermediate to the 10 recited values are also intended to be part of this invention.

[0560] For example, the dsRNA may be administered at a dose of about 0.1, 0.2, 0.3, 0.4, 0.5, 0.6, 0.7, 0.8, 0.9, 1, 1.1, 1.2, 1.3, 1.4, 1.5, 1.6, 1.7, 1.8, 1.9, 2, 2.1, 2.2, 2.3, 2.4, 2.5, 2.6, 2.7, 2.8, 2.9, 3, 3.1, 3.2, 3.3, 3.4, 3.5, 3.6, 3.7, 3.8, 3.9, 4, 4.1, 4.2, 4.3, 4.4, 4.5, 4.6, 4.7, 4.8, 4.9, 5, 5.1, 5.2, 5.3, 5.4, 5.5, 5.6, 5.7, 5.8, 5.9, 6, 6.1, 6.2, 6.3, 6.4, 6.5, 6.6, 6.7, 6.8, 6.9, 7, 7.1, 7.2, 7.3, 7.4, 7.5, 7.6, 7.7, 7.8, 7.9, 8, 8.1, 8.2, 8.3, 8.4, 8.5, 8.6, 8.7, 8.8, 8.9, 9, 9.1, 9.2, 9.3, 9.4, 9.5, 9.6, 9.7, 9.8, 9.9, or about 10 mg/kg. Values and ranges intermediate to the recited values are also intended to be part of this invention.

[0561] In some embodiments, for example, when a composition of the invention comprises a dsRNA as described herein and an N-acetylgalactosamine, subjects can be administered a therapeutic amount of iRNA, such as about 0.01 mg/kg to about 5 mg/kg, about 0.01 mg/kg to about 10 mg/kg, about 0.05 mg/kg to about 5 mg/kg, about 0.05 mg/kg to about 10 mg/kg, about 0.15 mg/kg to about 3 mg/kg, about 0.1 mg/kg to about 5 mg/kg, about 0.1 mg/kg to about 10 mg/kg, about 0.2 mg/kg to about 5 mg/kg, about 0.2 mg/kg to about 10 mg/kg, about 0.3 mg/kg to about 3 mg/kg, about 0.3 mg/kg to about 5 mg/kg, about 0.3 mg/kg to about 10 mg/kg, about 0.4 mg/kg to about 5 mg/kg, about 0.4 mg/kg to about 10 mg/kg, about 0.5 mg/kg to about 5 mg/kg, about 0.5 mg/kg to about 10 mg/kg, about 0.6 mg/kg to about 3 mg/kg, about 1 mg/kg to about 3 mg/kg, about 1 mg/kg to about 5 mg/kg, about 1 mg/kg to about 10 mg/kg, about 1.25 mg/kg to about 3 mg/kg, about 1.5 mg/kg to about 5 mg/kg, about 1.5 mg/kg to about 10 mg/kg, about 2 mg/kg to about 2.5 mg/kg, about 2 mg/kg to about 10 mg/kg, about 3 mg/kg to about 5 mg/kg, about 3 mg/kg to about 10 mg/kg, about 3.5 mg/kg to about 5 mg/kg, about 4 mg/kg to about 5 mg/kg, about 4.5 mg/kg to about 5 mg/kg, about 4 mg/kg to about 10 mg/kg, about 4.5 mg/kg to about 10 mg/kg, about 5 mg/kg to about 10 mg/kg, about 5.5 mg/kg to about 10 mg/kg, about 6 mg/kg to about 10 mg/kg, about 6.5 mg/kg to about 10 mg/kg, about 7 mg/kg to about 10 mg/kg, about 7.5 mg/kg to about 10 mg/kg, about 8 mg/kg to about 10 mg/kg, about 8.5 mg/kg to about 10 mg/kg, about 9 mg/kg to about 10 mg/kg, or about 9.5 mg/kg to about 10 mg/kg. Values and ranges intermediate to the recited values are also intended to be part of this invention.

[0562] For example, the dsRNA may be administered at a dose of about 0.1, 0.15, 0.2, 0.3, 0.4, 0.5, 0.6, 0.7, 0.8, 0.9, 1, 1.1, 1.2, 1.25, 1.3, 1.4, 1.5, 1.6, 1.7, 1.8, 1.9, 2, 2.1, 2.2, 2.3, 2.4, 2.5, 2.6, 2.7, 2.8, 2.9, 3, 3.1, 3.2, 3.3, 3.4, 3.5, 3.6, 3.7, 3.8, 3.9, 4, 4.1, 4.2, 4.3, 4.4, 4.5, 4.6, 4.7, 4.8, 4.9, 5, 5.1, 5.2, 5.3, 5.4, 5.5, 5.6, 5.7, 5.8, 5.9, 6, 6.1, 6.2, 6.3, 6.4, 6.5, 6.6, 6.7, 6.8, 6.9, 7, 7.1, 7.2, 7.3, 7.4, 7.5, 7.6, 7.7, 7.8, 7.9, 8, 8.1, 8.2, 8.3, 8.4, 8.5, 8.6, 8.7, 8.8, 8.9, 9, 9.1, 9.2, 9.3, 9.4, 9.5, 9.6, 9.7, 9.8, 9.9, or about 10 mg/kg. Values and ranges intermediate to the recited values are also intended to be part of this invention.

[0563] In other embodiments, for example, when a composition of the invention comprises a dsRNA as described herein and an N-acetylgalactosamine, subjects can be administered a therapeutic amount of iRNA, such as a dose of about 0.1 to about 50 mg/kg, about 0.25 to about 50 mg/kg, about 0.5 to about 50 mg/kg, about 0.75 to about 50 mg/kg, about 1 to about 50 mg/kg, about 1.5 to about 50 mg/kg, about 2 to about 50 mg/kg, about 2.5 to about 50 mg/kg, about 3 to about 50 mg/kg, about 3.5 to about 50 mg/kg, about 4 to about 50 mg/kg, about 4.5 to about 50 mg/kg, about 5 to about 50 mg/kg, about 7.5 to about 50 mg/kg, about 10 to about 50 mg/kg, about 15 to about 50 mg/kg, about 20 to about 50 mg/kg, about 20 to about 50 mg/kg, about 25 to about 50 mg/kg, about 25 to about 50 mg/kg, about 30 to about 50 mg/kg, about 35 to about 50 mg/kg, about 40 to about 50 mg/kg, about 45 to about 50 mg/kg, about 0.1 to about 45 mg/kg, about 0.25 to about 45 mg/kg, about 0.5 to about 45 mg/kg, about 0.75 to about 45 mg/kg, about 1 to about 45 mg/kg, about 1.5 to about 45 mg/kg, about 2 to about 45 mg/kg, about 2.5 to about 45 mg/kg, about 3 to about 45 mg/kg, about 3.5 to about 45 mg/kg, about 4 to about 45 mg/kg, about 4.5 to about 45 mg/kg, about 5 to about 45 mg/kg, about 7.5 to about 45 mg/kg, about 10 to about 45 mg/kg, about 15 to about 45 mg/kg, about 20 to about 45 mg/kg, about 20 to about 45 mg/kg, about 25 to about 45 mg/kg, about 25 to about 45 mg/kg, about 30 to about 45 mg/kg, about 35 to about 45 mg/kg, about 40 to about 45 mg/kg, about 0.1 to about 40 mg/kg, about 0.25 to about 40 mg/kg, about 0.5 to about 40 mg/kg, about 0.75 to about 40 mg/kg, about 1 to about 40 mg/kg, about 1.5 to about 40 mg/kg, about 2 to about 40 mg/kg, about 2.5 to about 40 mg/kg, about 3 to about 40 mg/kg, about 3.5 to about 40 mg/kg, about 4 to about 40 mg/kg, about 4.5 to about 40 mg/kg, about 5 to about 40 mg/kg, about 7.5 to about 40 mg/kg, about 10 to about 40 mg/kg, about 15 to about 40 mg/kg, about 20 to about 40 mg/kg, about 20 to about 40 mg/kg, about 25 to about 40 mg/kg, about 25 to about 40 mg/kg, about 30 to about 40 mg/kg, about 35 to about 40 mg/kg, about 0.1 to about 30 mg/kg, about 0.25 to about 30 mg/kg, about 0.5 to about 30 mg/kg, about 0.75 to about 30 mg/kg, about 1 to about 30 mg/kg, about 1.5 to about 30 mg/kg, about 2 to about 30 mg/kg, about 2.5 to about 30 mg/kg, about 3 to about 30 mg/kg, about 3.5 to about 30 mg/kg, about 4 to about 30 mg/kg, about 4.5 to about 30 mg/kg, about 5 to about 30 mg/kg, about 7.5 to about 30 mg/kg, about 10 to about 30 mg/kg, about 15 to about 30 mg/kg, about 20 to about 30 mg/kg, about 20 to about 30 mg/kg, about 25 to about 30 mg/kg, about 0.1 to about 20 mg/kg, about 0.25 to about 20 mg/kg, about 0.5 to about 20 mg/kg, about 0.75 to about 20 mg/kg, about 1 to about 20 mg/kg, about 1.5 to about 20 mg/kg, about 2 to about 20 mg/kg, about 2.5 to about 20 mg/kg, about 3 to about 20 mg/kg, about 3.5 to about 20 mg/kg, about 4 to about 20 mg/kg, about 4.5 to about 20 mg/kg, about 5 to about 20 mg/kg, about 7.5 to about 20 mg/kg, about 10 to about 20 mg/kg, or about 15 to about 20 mg/kg. In one embodiment, when a composition of the invention comprises a dsRNA as described herein and an N-acetylgalactosamine, subjects can be administered a therapeutic amount of about 10 to about 30 mg/kg of dsRNA. Values and ranges intermediate to the recited values are also intended to be part of this invention.

[0564] For example, subjects can be administered a therapeutic amount of iRNA, such as about 0.1, 0.2, 0.3, 0.4, 0.5, 0.6, 0.7, 0.8, 0.9, 1, 1.1, 1.2, 1.25, 1.3, 1.4, 1.5, 1.6, 1.7, 1.8, 1.9, 2, 2.1, 2.2, 2.3, 2.4, 2.5, 2.6, 2.7, 2.8, 2.9, 3, 3.1, 3.2, 3.3, 3.4, 3.5, 3.6, 3.7, 3.8, 3.9, 4, 4.1, 4.2, 4.3, 4.4, 4.5, 4.6, 4.7, 4.8, 4.9, 5, 5.1, 5.2, 5.3, 5.4, 5.5, 5.6, 5.7, 5.8, 5.9, 6, 6.1, 6.2, 6.3, 6.4, 6.5, 6.6, 6.7, 6.8, 6.9, 7, 7.1, 7.2, 7.3, 7.4, 7.5, 7.6, 7.7, 7.8, 7.9, 8, 8.1, 8.2, 8.3, 8.4, 8.5, 8.6, 8.7, 8.8, 8.9, 9, 9.1, 9.2, 9.3, 9.4, 9.5, 9.6, 9.7, 9.8, 9.9, 10, 10.5, 11, 11.5, 12, 12.5, 13, 13.5, 14, 14.5, 15, 15.5, 16, 16.5, 17, 17.5, 18, 18.5, 19, 19.5, 20, 20.5, 21, 21.5, 22, 22.5, 23, 23.5, 24, 24.5, 25, 25.5, 26, 26.5, 27, 27.5, 28, 28.5, 29, 29.5, 30, 31, 32, 33, 34, 34, 35, 36, 37, 38, 39, 40, 41, 42, 43, 44, 45, 46, 47, 48, 49, or about 50 mg/kg. Values and ranges intermediate to the recited values are also intended to be part of this invention.

[0565] In some embodiments, the RNAi agent is administered as a fixed dose of between about 25 mg to about 900 mg, e.g., between about 25 mg to about 850 mg, between about 25 mg to about 800 mg, between about 25 mg to about 750 mg, between about 25 mg to about 700 mg, between about 25 mg to about 650 mg, between about 25 mg to about 600 mg, between about 25 mg to about 550 mg, between about 25 mg to about 500 mg, between about 100 mg to about 850 mg, between about 100 mg to about 800 mg, between about 100 mg to about 750 mg, between about 100 mg to about 700 mg, between about 100 mg to about 650 mg, between about 100 mg to about 600 mg, between about 100 mg to about 550 mg, between about 100 mg to about 500 mg, between about 200 mg to about 850 mg, between about 200 mg to about 800 mg, between about 200 mg to about 750 mg, between about 200 mg to about 700 mg, between about 200 mg to about 650 mg, between about 200 mg to about 600 mg, between about 200 mg to about 550 mg, between about 200 mg to about 500 mg, between about 300 mg to about 850 mg, between about 300 mg to about 800 mg, between about 300 mg to about 750 mg, between about 300 mg to about 700 mg, between about 300 mg to about 650 mg, between about 300 mg to about 600 mg, between about 300 mg to about 550 mg, between about 300 mg to about 500 mg, between about 400 mg to about 850 mg, between about 400 mg to about 800 mg, between about 400 mg to about 750 mg, between about 400 mg to about 700 mg, between about 400 mg to about 650 mg, between about 400 mg to about 600 mg, between about 400 mg to about 550 mg, or between about 400 mg to about 500 mg.

[0566] In some embodiments, the RNAi agent is administered as a fixed dose of about 12.5 mg, about 15 mg, about 20 mg, about 25 mg, about 30 mg, about 35 mg, about 40 mg, about 45 mg, about 50 mg, about 55 mg, about 60 mg, about 65 mg, about 70 mg, about 75 mg, about 80 mg, about 85 mg, about 90 mg, about 95 mg, about 100 mg, about 110 mg, about 120 mg, about 125 mg, about 130 mg, about 140 mg, about 150 mg, about 160 mg, about 170 mg, about 175 mg, about 180 mg, about 190 mg, 200 mg, about 225 mg, about 250 mg, about 275 mg, about 300 mg, about 325 mg, about 350 mg, about 375 mg, about 400 mg, about 425 mg, about 450 mg, about 475 mg, about 500 mg, about 525 mg, about 550 mg, about 575 mg, about 600 mg, about 625 mg, about 650 mg, about 675 mg, about 700 mg, about 725 mg, about 750 mg, about 775 mg, about 800 mg, about 825 mg, about 850 mg, about 875 mg, or about 900 mg.

[0567] In certain embodiments, the RNAi agent is administered to a subject as a fixed dose of about 20, 25, 50, 75, 100, 125, 150, 175, 200, 225, 250, 275, 300, 325, 350, 375, 400, 425, 450, 475, 500, 525, 550, 575, or about 600 mg once every three months (i.e., once a quarter). In one embodiment, the administration is subcutaneous administration, e.g., self-administration via, e.g., a pre-filled syringe or auto-injector syringe. In some embodiments, a dose of the RNAi agent for subcutaneous administration is contained in a volume of less than or equal to one ml of, e.g., a pharmaceutically acceptable carrier.

[0568] In some embodiments, the RNAi agent is administered in two or more doses. If desired to facilitate repeated or frequent infusions, implantation of a delivery device, e.g., a pump, semi-permanent stent (e.g., intravenous, intraperitoneal, intracisternal or intracapsular), or reservoir may be advisable. In some embodiments, the number or amount of subsequent doses is dependent on the achievement of a desired effect, e.g., the suppression of a TTR gene, or the achievement of a therapeutic or prophylactic effect, e.g., reducing an amyloid deposit or reducing a symptom of a TTR-associated disease.

[0569] In some embodiments, the RNAi agent is administered according to a schedule. For example, the RNAi agent may be administered twice per week, three times per week, four times per week, or five times per week. In some embodiments, the schedule involves regularly spaced administrations, e.g., hourly, every four hours, every six hours, every eight hours, every twelve hours, daily, every 2 days, every 3 days, every 4 days, every 5 days, weekly, biweekly, monthly, or quarterly. In one embodiment, a dosage of 0.3 mg/kg, 0.6 mg/kg, 1 mg/kg, 1.25 mg/kg, 1.5 mg/kg, 2, 2.5 mg/kg, or 3 mg/kg is administered monthly. In another embodiment, a dosage of 0.3 mg/kg, 0.6 mg/kg, 1 mg/kg, 1.25 mg/kg, 1.5 mg/kg, 2. 2.5 mg/kg, or 3 mg/kg is administered quarterly.

[0570] In other embodiments, the schedule involves closely spaced administrations followed by a longer period of time during which the agent is not administered. For example, the schedule may involve an initial set of doses that are administered in a relatively short period of time (e.g., about every 6 hours, about every 12 hours, about every 24 hours, about every 48 hours, or about every 72 hours) followed by a longer time period (e.g., about 1 week, about 2 weeks, about 3 weeks, about 4 weeks, about 5 weeks, about 6 weeks, about 7 weeks, about 8 weeks, about 9 weeks, about 10 weeks, about 11 weeks, or about 12 weeks) during which the RNAi agent is not administered. In one embodiment, the RNAi agent is initially administered hourly and is later administered at a longer interval (e.g., daily, weekly, biweekly, monthly, or quarterly). In another embodiment, the RNAi agent is initially administered daily and is later administered at a longer interval (e.g., weekly, biweekly, monthly, or quarterly). In certain embodiments, the longer interval increases over time or is determined based on the achievement of a desired effect.

[0571] In a specific embodiment, the RNAi agent is administered once daily during a first week, followed by weekly, monthly or quarterly dosing starting on the eighth day of administration. In another specific embodiment, the RNAi agent is administered every other day during a first week followed by weekly, monthly or quarterly dosing starting on the eighth day of administration. In another embodiment, the RNAi agent is administered once daily for five days during a first week, followed by weekly, monthly or quarterly dosing administration.

[0572] Any of these schedules may optionally be repeated for one or more iterations. The number of iterations may depend on the achievement of a desired effect, e.g., the suppression of a TTR gene, retinol binding protein level, vitamin A level, and/or the achievement of a therapeutic or prophylactic effect, e.g., reducing an amyloid deposit or reducing a symptom of a TTR-associated disease.

[0573] In some embodiments, the RNAi agent is administered with other therapeutic agents or other therapeutic regimens. For example, other agents or other therapeutic regimens suitable for treating a TTR-associated disease may include a liver transplant, which can reduce mutant TTR levels in the body; Tafamidis (Vyndaqel), which kinetically stabilizes the TTR tetramer preventing tetramer dissociation required for TTR amyloidogenesis; and diuretics, which may be employed, for example, to reduce edema in TTR amyloidosis with cardiac involvement.

[0574] In one embodiment, a subject is administered an initial dose and one or more maintenance doses of an RNAi agent. The maintenance dose or doses can be the same or lower than the initial dose, e.g., one-half of the initial dose. A maintenance regimen can include treating the subject with a dose or doses ranging from 0.01 μg to 15 mg/kg of body weight per day, e.g., 1 mg/kg, 1.25 mg/kg, 1.5 mg/kg, 2 mg/kg, 2.5 mg/kg, 3 mg/kg, 4 mg/kg, 5 mg/kg, 10 mg/kg, 0.1 mg/kg, 0.15 mg/kg, 0.3 mg/kg, 0.6 mg/kg, 0.01 mg/kg, 0.001 mg/kg, or 0.00001 mg/kg of bodyweight per day, or a dose or doses of about 12.5 mg to about 900 mg, e.g., about 25 mg, about 30 mg about 35 mg, about 40 mg, about 45 mg, about 50 mg, about 55 mg, about 60 mg, about 65 mg, about 70 mg, about 75 mg, about 80 mg, about 85 mg, about 90 mg, about 95 mg, about 100 mg, about 125 mg, about 150 mg, about 175 mg, 200 mg, about 225 mg, about 250 mg, about 275 mg, about 300 mg, about 325 mg, about 350 mg, about 375 mg, about 400 mg, about 425 mg, about 450 mg, about 475 mg, about 500 mg, about 525 mg, about 550 mg, about 575 mg, about 600 mg, about 625 mg, about 650 mg, about 675 mg, about 700 mg, about 725 mg, about 750 mg, about 775 mg, about 800 mg, about 825 mg, about 850 mg, about 875 mg, or about 900 mg per week. The maintenance doses are, for example, administered no more than once every 2 days, once every 5 days, once every 7 days, once every 10 days, once every 14 days, once every 21 days, once every 30 days, or once every 90 days. Further, the treatment regimen may last for a period of time which will vary depending upon the nature of the particular disease, its severity and the overall condition of the patient. In certain embodiments the dosage may be delivered no more than once per day, e.g., no more than once per 24, 36, 48, or more hours, e.g., no more than once every 5 or 8 days. Following treatment, the patient can be monitored for changes in his/her condition. The dosage of the RNAi agent may either be increased in the event the patient does not respond significantly to current dosage levels, or the dose may be decreased if an alleviation of the symptoms of the disease state is observed, if the disease state has been ablated, or if undesired side-effects are observed.

### VI. Kits

[0575] The present invention also provides kits for performing any of the methods of the invention. Such kits include one or more RNAi agent(s) and instructions for use, e.g., instructions for inhibiting expression of a TTR in a cell by contacting the cell with the RNAi agent(s) in an amount effective to inhibit expression of the TTR. The kits may optionally further comprise means for contacting the cell with the RNAi agent (e.g., an injection device or an infusion pump), or means for measuring the inhibition of TTR (e.g., means for measuring the inhibition of TTR mRNA or TTR protein). Such means for measuring the inhibition of TTR may comprise a means for obtaining a sample from a subject, such as, e.g., a plasma sample. The kits of the invention may optionally further comprise means for administering the RNAi agent(s) to a subject or means for determining the therapeutically effective or prophylactically effective amount.

[0576] Suitable RNAi agents for inclusion in the kits of the invention include any one of the RNAi agents listed in any one of Tables 1, 3, 5, 6, or 7. In one embodiment, the RNAi agent is selected from the group consisting of AD-66016, AD-65492, AD-66017, and AD-66018.

[0577] The RNAi agent may be provided in any convenient form, such as a solution in sterile water for injection. For example, the RNAi agent may be provided as a 500 mg/ml, 450 mg/ml, 400 mg/ml, 350 mg/ml, 300 mg/ml, 250 mg/ml, 200 mg/ml, 150 mg/ml, 100 mg/ml, or 50 mg/ml solution in sterile water for injection.

[0578] This invention is further illustrated by the following examples which should not be construed as limiting. The contents of all references and published patents and patent applications cited throughout the application are hereby incorporated herein by reference.

### EXAMPLES

### Example 1: In Vitro Stability and Silencing Activity of Chemically Modified RNAi Agents that Target TTR

[0579] The following experiments demonstrated the beneficial effects of certain chemical modifications, including no more than 8 2′-fluoro modifications on the sense strand, no more than 6 2′-fluoro modifications on the antisense strand, six phosphorothioate nucleotide linkages, and a ligand, e.g., a GalNAc₃ ligand, on the silencing activity of RNAi agents that target TTR. The sequences of the agents investigated are provided in Table 1 below.

[0580] TTR siRNA sequences were synthesized at a 1 μmol scale on a Mermade 192 synthesizer (BioAutomation) using the solid support mediated phosphoramidite chemistry. The solid support was controlled pore glass (500 A) loaded with custom GalNAc ligand or universal solid support (AM biochemical). Ancillary synthesis reagents, 2′-F and 2′-O-Methyl RNA and deoxy phosphoramidites were obtained from Thermo-Fisher (Milwaukee, WI) and Hongene (China). 2′F, 2′-O-Methyl, GNA (glycol nucleic acids), 5′phosphate and abasic modifications were introduced employing the corresponding phosphoramidites. Synthesis of 3′ GalNAc conjugated single strands was performed on a GalNAc modified CPG support. Custom CPG universal solid support was used for the synthesis of antisense single strands. Coupling time for all phosphoramidites (100 mM in acetonitrile) was 5 minutes employing 5-Ethylthio-1H-tetrazole (ETT) as the activator (0.6 M in acetonitrile). Phosphorothioate linkages were generated using a 50 mM solution of 3-((Dimethylamino-methylidene)amino)-3H-1,2,4-dithiazole-3-thione (DDTT, obtained from Chemgenes (Wilmington, MA, USA)) in anhydrous acetonitrile/pyridine (1:1 v/v). Oxidation time was 3 minutes. All sequences were synthesized with final removal of the DMT group (“DMT off”).

[0581] Upon completion of the solid phase synthesis, oligoribonucleotides were cleaved from the solid support and deprotected in sealed 96 deep well plates using 200 μL Aqueous Methylamine reagents at 60° C. for 20 minutes. At the end of cleavage and deprotection step, the synthesis plate was allowed to come to room temperature and was precipitated by addition of ImL of acetontile: ethanol mixture (9:1). The plates were cooled at −80 C for 2 hrs, superanatant decanted carefully with the aid of a multi channel pipette. The oligonucleotide pellet was re-suspended in 20 mM NaOAc buffer and was desalted using a 5 mL HiTrap size exclusion column (GE Healthcare) on an AKTA Purifier System equipped with an A905 autosampler and a Frac 950 fraction collector. Desalted samples were collected in 96-well plates. Samples from each sequence were analyzed by LC-MS to confirm the identity, UV (260 nm) for quantification and a selected set of samples was analysed by IEX chromatography to determine purity.

[0582] Annealing of TTR single strands was performed on a Tecan liquid handling robot. Equimolar mixtures of sense and antisense single strands were combined and annealed in 96 well plates. After combining the complementary single strands, the 96-well plate was sealed tightly and heated in an oven at 100° C. for 10 minutes and allowed to come slowly to room temperature over a period 2-3 hours. The concentration of each duplex was normalized to 10 μM in 1×PBS.

[0583] These duplexes were assayed for in vitro metabolic stability using a rat cytosol stability assay. For such an assay, female rat liver cytosol (Xenotech Cat. #R1500.C) was thawed to room temperature and diluted to 1 mg/mL in 50 mM Tris buffer: HCl pH 7.4, 5 mM MgCl2. Twenty-four hour samples were prepared by mixing 100 μL of 1 mg/mL Cytosol with 25 μL of 0.4 mg/mL siRNA sample in a microcentrifuge tube and incubating for 24 hours in an eppendorf Thermomixer set to 37° C. and 300 rpm. After 24 hours of incubation 300 μL of Phenomenex Lysis Loading Buffer (Cat. #ALO-8498) and 12.5 μL of a 0.4 mg/mL internal standard siRNA were added to each sample. Zero hour samples were prepared by mixing 100 μL of 1 mg/mL Cytosol with 25 μL of 0.4 mg/mL siRNA sample, 300 μL of Phenomenex Lysis Loading Buffer, and 12.5 μL of a 0.4 mg/mL internal standard siRNA. siRNA was extracted from 24 hour samples and 0 hour samples using a Phenomenex Clarity OTX Starter Kit (Cat. #KSO-8494). After the samples were extracted they were transferred to a microcentrifuge tube and dried down using a Labconco CentriVap Concentrator (Cat. #7810010). The samples were then resuspended with 500 μL of nuclease free water. Fifty μL of each sample was run on an Agilent Technologies 1260 Infinity Binary LC with Agilent Technologies 6130 Quadrupole LC/MS. The analysis was run using double column setup in regeneration mode. The Quaternary pump method was run for 12.20 minutes at 0.400 mL/min with the following timetable:

| Time | |
|---|---|
| Function | Parameter |
| 0.20 | 5% Buffer A(16 mM TEA 200 mM HFIP), 95% |
| | Buffer B (100% Methanol) |
| 2.50 | 5% Buffer A(16 mM TEA 200 mM HFIP), 95% |
| | Buffer B (100% Methanol) |
| 3.00 | 100% Buffer A(16 mM TEA 200 mM HFIP) |

The Binary Pump method was run for 12.20 min at 0.700 ml/min with the following timetable:

### Time Function Parameter

| Time | |
|---|---|
| Function | Parameter |
| 0.00 | 100% Buffer A(16 mM TEA 200 mM HFIP) |
| 0.40 | 100% Buffer A(16 mM TEA 200 mM HFIP) |
| 10.00 | 60% Buffer A(16 mM TEA 200 mM HFIP), |
| | 40% Buffer B (100% ACN) |
| 10.10 | 100% Buffer A(16 mM TEA 200 mM HFIP) |
| 12.20 | 100% Buffer A(16 mM TEA 200 mM HFIP) |

Both the left and right column was set at 75.00° C. The UV signal was measured at 260 nm wavelength. The percent remaining of each strand was calculated using the following equation:

$$\% Strand remaining = 100 * ( Peak {Area}_{Strand 24 h} / Peak {Area}_{Strand 0 h} * ( Peak {Area}_{Standard 24 h} / Peak {Area}_{Strandard 0 h} ) ) .$$

[0584] The results of these twenty-four hour cytosol stability assays demonstrate that all of the duplexes are highly stable.

[0585] A subset of these agents was also assessed for in vitro metabolic stability using a tritosome stability assay. For the tritosome stability assays, rat liver tritosomes (Xenotech custom product PR14044) were thawed to room temperature and diluted to 0.5 units/mL Acid Phosphatase in 20 mM Sodium Citrate pH 5.0 Buffer. Twenty-four hour samples were prepared by mixing 100 μL of 0.5 units/mL Acid Phosphatase Tritosomes with 25 μL of 0.4 mg/mL siRNA sample in a microcentrifuge tube and incubating for twenty-four hours in an eppendorf Thermomixer set to 37° C. and 300 rpm. After twenty-four hours of incubation, 300 μL of Phenomenex Lysis Loading Buffer (Cat. #ALO-8498) and 12.5 μL of a 0.4 mg/mL internal standard siRNA were added to each sample. Time 0 hour samples were prepared by mixing 100 μL of 0.5 units/mL Acid Phosphatase Tritosomes with 25 μL of 0.4 mg/mL siRNA sample, 300 μL of Phenomenex Lysis Loading Buffer, and 12.5 μL of a 0.4 mg/mL internal standard siRNA. siRNA was extracted from twenty-four hour samples and 0 hour samples using a Phenomenex Clarity OTX Starter Kit (Cat. #KSO-8494). After the samples were extracted, they were transferred to a microcentrifuge tube and dried down using a Labconco CentriVap Concentrator (Cat. #7810010). The samples were then resuspended with 500 μL of nuclease free water. Fifty μL of each sample was run on an Agilent Technologies 1260 Infinity Binary LC with Agilent Technologies 6130 Quadrupole LC/MS. The analysis was run using double column setup in regeneration mode. The Quaternary pump method was run for 12.20 minutes at 0.400 ml/min with the following timetable:

| Time | |
|---|---|
| Function | Parameter |
| 0.20 | 5% Buffer A(16 mM TEA 200 mM HFIP), |
| | 95% Buffer B (100% Methanol) |
| 2.50 | 5% Buffer A(16 mM TEA 200 mM HFIP), |
| | 95% Buffer B (100% Methanol) |
| 3.00 | 100% Buffer A(16 mM TEA 200 mM HFIP) |

The Binary Pump method was run for 12.20 min at 0.700 mL/min with the following timetable:

| Time | |
|---|---|
| Function | Parameter |
| 0.00 | 100% Buffer A(16 mM TEA 200 mM HFIP) |
| 0.40 | 100% Buffer A(16 mM TEA 200 mM HFIP) |
| 10.00 | 60% Buffer A(16 mM TEA 200 mM HFIP), |
| | 40% Buffer B (100% ACN) |
| 10.10 | 100% Buffer A(16 mM TEA 200 mM HFIP) |
| 12.20 | 100% Buffer A(16 mM TEA 200 mM HFIP) |

Both the left and right column was set at 75.00° C. The UV signal was measured at 260 nm wavelength. The percent remaining of each strand was calculated using the following equation:

$$\% Strand remaining = 100 * ( Peak {Area}_{Strand 24 h} / Peak {Area}_{Strand 0 h} * ( Peak {Area}_{Standard 24 h} / Peak {Area}_{Strandard 0 h} ) ) .$$

[0586] The results of the twenty-four hour tritosome stability assays, provided in FIG. 1, demonstrate that all of the duplexes are highly stable in tritosomes.

TABLE 1
Modified Sense and Antisense Strand Sequences of TTR dsRNAs

| Duplex | Sense | Sense sequence | SEQ ID | Antisense | Antisense sequence | SEQ ID |
|---|---|---|---|---|---|---|
| ID | ID | 5′ to 3′ | NO | ID | 5′ to 3′ | NO |
| AD-51547 | A-106305 | UfgGfgAfuUfuCfAfUfgUfaacCfaAfgAfL96 | 15 | A-102978 | uCfuUfgGfUfUfaCfaugAfaAfuCfcCfasUfsc | 29 |
| AD-58142 | A-117240 | UfsgsGfgAfuUfuCfAfUfgUfaacCfaAfgAfL96 | 16 | A-117241 | usCfsuUfgGfUfUfaCfaugAfaAfuCfcCfasusc | 30 |
| AD-64527 | A-128512 | usgsggauuucadTguaacaaagaL96 | 17 | A-128525 | usdCsuugguuadCaugdAaaucccasusc | 31 |
| AD-65367 | A-128499 | usgsggAfuUfuCfAfUfgUfaaccaagAfL96 | 18 | A-128520 | usCfsuugguuacaugAfaaucccasusc | 32 |
| AD-65489 | A-131365 | usgggauuucadTguaacaaagaL96 | 19 | A-128520 | usCfsuugguuacaugAfaaucccasusc | 33 |
| AD-65481 | A-131354 | usgsggauUfuCfAfUfguaaccaagaL96 | 20 | A-131364 | UfsCfsuugGfuuacaugAfaAfucccasusc | 34 |
| AD-65488 | A-131354 | usgsggauUfuCfAfUfguaaccaagaL96 | 21 | A-131358 | PusCfsuugGfuuacaugAfaAfucccasusc | 35 |
| AD-65496 | A-131354 | usgsggauUfuCfAfUfguaaccaagaL96 | 22 | A-131360 | PusCfsuugGfuuAfcaugAfaAfucccasusc | 36 |
| AD-65491 | A-128557 | usgsggauuucadTguaacY34aagaL96 | 23 | A-128525 | usdCsuugguuadCaugdAaaucccasusc | 37 |
| AD-65495 | A-131353 | usgsggauUfuCfAfUfguaaCfcaagaL96 | 24 | A-128516 | usCfsuugGfuUfAfcaugAfaAfucccasusc | 38 |
| AD-65367 | A-128499 | usgsggAfuUfuCfAfUfgUfaaccaagAfL96 | 25 | A-128520 | usCfsuugguuacaugAfaaucccasusc | 39 |
| AD-65493 | A-128512 | usgsggauuucadTguaacaaagaL96 | 26 | A-131366 | PusCfsuugguuacaugAfaaucccasusc | 40 |
| AD-65494 | A-128512 | usgsggauuucadTguaacaaagaL96 | 27 | A-128526 | PusdCsuugguuadCaugdAaaucccasusc | 41 |
| AD-64527 | A-128512 | usgsggauuucadTguaacaaagaL96 | 28 | A-128525 | usdCsuugguuadCaugdAaaucccasusc | 42 |

TABLE 2
Abbreviations of nucleotide monomers used in nucleic
acid sequence representation. It will be understood that
these monomers, when present in an oligonucleotide,
are mutually linked by 5′-3′-phosphodiester bonds.

| Abbreviation | Nucleotide(s) |
|---|---|
| A | Adenosine-3′-phosphate |
| Af | 2′-fluoroadenosine-3′-phosphate |
| Afs | 2′-fluoroadenosine-3′-phosphorothioate |
| As | adenosine-3′-phosphorothioate |
| C | cytidine-3′-phosphate |
| Cf | 2′-fluorocytidine-3′-phosphate |
| Cfs | 2′-fluorocytidine-3′-phosphorothioate |
| Cs | cytidine-3′-phosphorothioate |
| G | guanosine-3′-phosphate |
| Gf | 2′-fluoroguanosine-3′-phosphate |
| Gfs | 2′-fluoroguanosine-3′-phosphorothioate |
| Gs | guanosine-3′-phosphorothioate |
| T | 5′-methyluridine-3′-phosphate |
| Tf | 2′-fluoro-5-methyluridine-3′-phosphate |
| Tfs | 2′-fluoro-5-methyluridine-3′-phosphorothioate |
| Ts | 5-methyluridine-3′-phosphorothioate |
| U | Uridine-3′-phosphate |
| Uf | 2′-fluorouridine-3′-phosphate |
| Ufs | 2′-fluorouridine-3′-phosphorothioate |
| Us | uridine-3′-phosphorothioate |
| N | any nucleotide (G, A, C, T or U) |
| a | 2′-O-methyladenosine-3′-phosphate |
| as | 2′-O-methyladenosine-3′-phosphorothioate |
| C | 2′-O-methylcytidine-3′-phosphate |
| cs | 2′-O-methylcytidine-3′-phosphorothioate |
| g | 2′-O-methylguanosine-3′-phosphate |
| gs | 2′-O-methylguanosine-3′-phosphorothioate |
| t | 2′-O-methyl-5-methylthymine-3′-phosphate |
| ts | 2′-O-methyl-5-methylthymine-3′-phosphorothioate |
| u | 2′-O-methyluridine-3′-phosphate |
| us | 2′-O-methyluridine-3′-phosphorothioate |
| s | phosphorothioate linkage |
| L96 | N-[tris(GalNAc-alkyl)-amidodecanoyl)]- |
| | 4-hydroxyprolinol Hyp-(GalNAc-alkyl)3 |
| dA | deoxy-adenosine |
| dC | deoxy-cytodine |
| dG | deoxy-guanosine |
| (dT) | 2′-deoxy thymidine-3′-phosphate |
| Y34 | 2-hydroxymethyl-tetrahydrofurane-4-methoxy- |
| | 3-phosphate (abasic 2′-OMe furanose) |
| Y44 | 2-hydroxymethyl-tetrahydrofurane-5-phosphate |
| (Cgn) | Cytidine-glycol nucleic acid (GNA) |
| P | Phosphate |
| VP | Vinyl-phosphate |

[0587] An additional set of agents targeting TTR were designed and synthesized. The sequences of these agents are provided in Table 3, below.

[0588] These additional agents were evaluated in in vitro assays. In particular, the IC₅₀ for each iRNA agent was determined in Hep3B cells (a human hepatoma cell line) or primary cynomologous hepatocytes (Life Technologies) by standard reverse transfection using Lipofectamine RNAiMAX. Hep3b cells were cultured in EMEM with 10% FBS, while primary cynomologous hepatocytes were thawed immediately prior to use and cultured in WMEM with 10% FBS. Reverse transfection was carried out by adding 5 μL of RNA duplex per well into a 384-well plate along with 4.9 μL of Opti-MEM plus 0.1 μL of Lipofectamine RNAiMax per well (Invitrogen, Carlsbad CA. cat #13778-150) and incubating at room temperature for 15-20 minutes. Following incubation, 40 u L of complete growth media without antibiotic containing 5,000 Hep3B cells or primary cynomologous hepatocytes was then added to each well. Collagen-coated plates were used for the primary hepatocytes. Cells were incubated for 24 hours at 37° C. in an atmosphere of 5% CO₂ prior to lysis and analysis of TTR and GAPDH mRNA by RT-qPCR. Eight different siRNA concentrations ranging from 10 nM to 0.38 fM were assessed for IC₅₀ determination and TTR/GAPDH for siRNA transfected cells was normalized to cells transfected with 10 nM Luciferase siRNA.

[0589] Free uptake silencing in primary cynomolgus hepatocytes was assessed following incubation with TTR siRNA for 24 hours. The method was similar to that described above, with the exception that 5u L complete growth medium was substituted for the 5 μL containing Lipofectamine RNAiMax and Optimem. Downstream analysis for TTR and GAPDH mRNA was performed as described above. For a typical dose response curve, siRNAs were titrated from 500 nM to 0.1.8 pM by eight-point 6-fold serial dilution.

[0590] The results of these assays (provided in Table 4) demonstrate that all of the duplexes potently inhibit TTR mRNA expression.

[0591] The in vitro stability of these additional agents was also assessed using the cytosol and tritosome stability assays described above.

[0592] The results of the twenty-four hour cytosol stability assay are provided in FIG. 2A and the results of the twenty-four hour tritosome stability assay are provided in FIG. 2B and demonstrate that all of the duplexes are highly stable in tritosomes and rat cytosol.

TABLE 3
Modified Sense and Antisense Strand Sequences of TTR dsRNAs

| Duplex | Sense | Sense sequence | SEQ ID | Antisense | Antisense sequence | SEQ ID |
|---|---|---|---|---|---|---|
| ID | ID | 5′ to 3′ | NO | ID | 5′ to 3′ | NO |
| AD-66016 | A-131354 | usgsggauUfuCfAfUfguaacc | 43 or 10 | A-128520 | usCfsuugguuacaugAfaauccc | 47 or 6 |
| | | aagaL96 | | | asusc | |
| AD-65492 | A-131354 | usgsggauUfuCfAfUfguaacc | 44 or 10 | A-131359 | usCfsuugGfuuAfcaugAfaAfu | 48 or 7 |
| | | aagaL96 | | | cccasusc | |
| AD-66017 | A-131354 | usgsggauUfuCfAfUfguaacc | 45 or 10 | A-131903 | UfsCfsuugGfuuAfcaugAfaAf | 49 or 8 |
| | | aagaL96 | | | ucccasusc | |
| AD-66018 | A-131354 | usgsggauUfuCfAfUfguaacc | 46 or 10 | A-131902 | VPusCfsuugGfuuAfcaugAfaA | 50 or 9 |
| | | aagaL96 | | | fucccasusc | |

TABLE 4
In vitro Activity of Additional TTR RNAi Agents

| | AD-66016 (65367 AS) | | AD-65492 (u) | | AD-66017 (Uf) | | AD-66018 (VPu) | |
|---|---|---|---|---|---|---|---|---|
| IC50 (nM) | Transfection | Free Uptake | Transfection | Free Uptake | Transfection | Free Uptake | Transfection | Free Uptake |
| Hep3b | 0.931 | N/A | 0.722 | N/A | 0.108 | N/A | 0.053 | N/A |
| Cyno Hepatocytes | 0.235 | 5.157 | 0.21 | 3.629 | 0.026 | 0.284 | 0.015 | 0.191 |

### Example 2. In Vivo TTR Silencing

[0593] The in vivo efficacy of the additional agents described above was assessed in transgenic mice that express the valine 30 methionine variant of human TTR (V30M hTTR) (see, e.g., Nagata, et al. (1995) J Biochem. 117:169-175; Kohno, et al. (1997) Am J Pathol. 150 (4): 1497-508). The V30M variant of TTR is known to cause familial amyloid polyneuropathy type I in humans. See, e.g., Lobato, L. (2003) J Nephrol., 16 (3): 438-42.

[0594] Eleven- to thirteen-month old TTR V30m mice were subcutaneously administered a single 1 mg/kg or 2.5 mg/kg dose of the agents and the level of TTR was determined in the serum of the animals pre-dose and at days 3, 7, 10, 14, 21, 28, 35, 42, 56, 70 and 84 post-dose. Briefly, TTR levels were assayed using a validated TTR enzyme-linked immunosorbent assay (ELISA) (see, e.g., Coelho, et al. (2013) N Engl J Med 369:819). Ninety-six-well immuno-microplates were coated at 4° with rabbit anti-human TTR pAb (Abcam) 24 hours prior to the start of the TTR Serum Protein ELISA assay. On the day of assay, plates were washed in TBS-T, and blocked in 1× Powerblock (Biogenex) for 2 hours at room temperature. Scrum samples were diluted 15,000 fold in 1× Powerblock. A 12-point human TTR standard curve employing a human TTR protein standard (Sigma-Aldrich, P1742), was generated using 1.6× serial dilutions, ranging from 250 to 0 ng/mL. Following the block, 100 μL volumes of standards and samples were added to the plate and allowed to incubate for 2 hours at room temperature. Plates were washed in TBS-T, and incubated for 1 hour at room temperature with Sheep Anti-hTTR primary antibody (AbCam) diluted 1:2500 in 1× Powerblock. After a TBS-T wash, plates were incubated for 1 hour at room temperature with Donkey anti-sheep-Alkaline phosphatase secondary antibody (AbCam) diluted 3:10000 in 1× Powerblock. Plates were washed in TBS-T and 100 μL volume of prepared substrate (SIGMAFAST™ p-Nitrophenyl phosphate Tablets) was added per well and allowed to react for 30 minutes at room temperature in the dark. Reactions were quenched with 0.05 ml per well of 1 M NaOH. Absorbance at 405 nm was read on a SpectraMax plate reader, and data were fit to a 4-parameter curve to determine serum TTR protein levels in μg/mL. Protein levels from individual animals were normalized to their respective individual pre-dose plasma protein values to determine the fraction TTR remaining relative to pre-dose.

[0595] The results of the 1 mg/kg single dose experiments are provided in FIG. 3 and the results of the 2.5 mg/kg single dose experiments are provided in FIG. 4. The results demonstrate that all of the agents potently and durably inhibit TTR expression, with a nadir reached at about day 7 post-administration. The results also demonstrate that at day 42 following a single 1 mg/kg dose of AD-65492, AD-66017, or AD-66018, more than 40% serum TTR suppression remains, and at day 42 following a single 2.5 mg/kg dose of AD-65492 or AD-66018, more than 60% serum TTR suppression remains. Recovery to baseline serum TTR concentrations occurs between 56 and 84 days post-administration following a single 1 mg/kg dose, and between days 70 and 84 post-administration following a single 2.5 mg/kg dose.

[0596] The effective dose for 80% silencing in the animals (ED₈₀) was calculated as 1 mg/kg. These data, thus, indicate that AD-65492, AD-66016, AD-66017, and AD-66018 are effective for treating a subject having a TTR-associated disorder in low dose and/or monthly dosing regimes.

### Example 3. Rat Exploratory Toxicity Study

[0597] Preclinical toxicity studies of AD-66016, AD-65492, AD-66017, and AD-66018 were also performed in rats. Briefly, at days 1, 8, and 15, five male rats per group were subcutaneously administered either a 30 mg/kg or 100 mg/kg dose of AD-66016, AD-65492, AD-66017, or AD-66018. Control animals were administered a placebo at days 1, 8, and 15. At day 16, all of the animals were sacrificed. Prior to sacrifice, the animals were monitored daily for any clinical symptoms and body weights were measured weekly. After sacrifice, the animals were necropsied, and samples were analyzed by complete serum chemistry, hematology and coagulation panels, by histopathology of the liver and kidney, and for liver transaminase concentration.

[0598] The results of these analyses demonstrate that AD-66016, AD-65492, AD-66017, and AD-66018 are well-tolerated clinically with no adverse clinical signs or body weight changes.

### Example 4. Efficacy of Multi-Dose Administration of AD-65492 and AD-66017

[0599] The effect of a multi-dose regimen of AD-65492 and AD-66017 on TTR protein expression in hTTR V30M transgenic (Tg) mice was evaluated.

[0600] In one set of experiments, eleven-to thirteen-month old hTTR V30M mice were subcutaneously administered a weekly 2 mg/kg dose of AD-65492 for three weeks (QWx3) and the level of TTR protein was determined in the serum of the animals pre-dose and at days 7, 14, 17, and 21 post-dose, as described above.

[0601] FIG. 5 demonstrates that administration of AD-65492 in a QWx3 dosing regimen to hTTR V30M Tg mice achieved and sustained a greater than 90% suppression of serum TTR protein expression.

[0602] In another set of experiments, AD-65492 and AD-66017 were subcutaneously administered to eleven-to thirteen-month old hTTR V30M Tg mice at a 0.3 mg/kg dose once a month for four months (QMx4 @ 0.3 mg/kg), at a 1 mg/kg dose once a month for four months (QM4 @ 1 mg/kg), or at a 3 mg/kg dose once a month for four months (QM4 @ 3 mg/kg). Serum TTR protein levels were determined as described above pre-dose and at days 7, 14, 21, 28, 35, 42, 49, 56, 63, 70, 84, 91, 98, and 185 post-dose.

[0603] As shown in FIGS. 6A-6C, the TTR knockdown levels at day 7 post-dose were similar post-second, third and fourth doses and the nadir of TTR expression achieved at the 3 mg/kg, 1 mg/kg and 0.3 mg/kg dose is greater than 80%, about 70-85%, and about 25-35%, respectively. These graphs also demonstrate that AD-65492 provides a more sustained level of TTR silencing than AD-66017, to more than 100 days post final dose, with about 60%, 40%, and about 35% remaining TTR suppression at 3 mg/kg, 1 mg/kg, and 0.3 mg/kg, respectively. Furthermore, for AD-65492, multi-dosing (QMx4) is additive at the 0.3 mg/kg dose resulting in about 40% TTR knockdown after the fourth monthly dose as compared to the first dose having a knockdown of about 25-35%. In addition, although there was some recovery of TTR protein levels prior to each monthly dose across all dose levels for each agent, like a single subcutaneous dose, the effective dose to achieve 80% knockdown (ED₈₀) for the multi-dose regimens was calculated as about 1 mg/kg. Thus, the pharmacodynamic activity and kinetics of both compounds in all three dosing regimens was comparable to the pharmacodynamic activity and kinetics of the same compounds when administered as a single dose.

### Example 5. TTR Silencing in Non-Human Primates

[0604] As demonstrated in the Examples above, AD-65492 and AD-66017 are well-tolerated and potently and durably suppress TTR protein levels in vivo.

[0605] Accordingly, the efficacy of AD-65492 and AD-66017 was further studied by administration of different doses and different dosing regimens of these iRNA agents in Cynomologous monkeys. FIG. 7 provides an outline of this study. Briefly, four Groups, Groups 1, 2, 4, and 5, were subcutaneously administered either a single 0.3 mg/kg dose (Groups 1 and 4) or a single 1 mg/kg dose of the iRNA agent (Groups 2 and 5). Four other Groups, Groups 3 and 6-8, were administered a monthly dose of either 1 mg/kg for 4 months (QMx4) (Groups 7 and 8) or a monthly dose of 3 mg/kg for 4 months (QMx4) (Groups 3 and 6). Scrum was collected on Days-7 and -1 pre-dose and days 3, 7, 10, 14, 21, 28, 35, 42, 49, 56, 63, 70, 77, 84, 91, 105, and 119 post-dose; plasma was collected on day 1 pre-dose, and 0.5, 1, 2, 4, 8, 24, 48, 96 and 168 hours post dose. The serum level of TTR protein was determined as described above.

[0606] FIG. 8A provides the results of the 0.3 mg/kg single dose study, FIG. 8B provides the results of the 1 mg/kg single dose study, and FIG. 8C provides the results of the 3 mg/kg single dose study. For comparison purposes, FIG. 8B also depicts the effect of administration of a single subcutaneous 2.5 mg/kg dose of AD-51547 on TTR expression in Cynomologous monkeys, and FIG. 8C also depicts the effect of administration of a single subcutaneous 5 mg/kg dose of AD-51547 on TTR expression in Cynomologous monkeys. These graphs demonstrate that the ED₅₀ for both AD-65492 and AD-66017 iRNA agents is about 0.3 mg/kg, that the nadir of TTR expression is reached at about day 28 for both doses and for both iRNA agents, and that AD-65492 is more effective at suppressing TTR protein expression than AD-66017 at the higher dose level with a single dose. The graphs also demonstrate that AD-65942 provides greater than 90% sustained suppression of TTR expression through Day 42 following a single 1 mg/kg dose and greater than 80% TTR suppression through Day 63, with about 40% remaining TTR suppression by day 119 post-dose, and that AD-66017 provides a maximum of 73% suppression of TTR expression following a single 1 mg/kg dose, with recovery of TTR expression beginning before Day 35 and recovery to within about 20% of baseline by day 119 post-dose.

[0607] FIG. 9A provides the results of the 1 mg/kg multi-dose study and FIG. 9B provides the results of the 3 mg/kg multi-dose study for AD-65492 and AD-66017. For comparison purposes, FIG. 9A also depicts the effect of the administration of a daily 5 mg/kg dose of AD-51547 for 5 days (first five arrows at days 0-4), followed by a weekly 5 mg/kg dose for four weeks (arrows at days 7, 14, 21, and 28) (QDx5, QWx4) on TTR expression in Cynomologous monkeys. The graphs demonstrate that both iRNA agents provide robust TTR protein suppression and that both iRNA agents completely suppress TTR protein expression between Days 21 and 28 at the 3 mg/kg dose. The graphs also demonstrate that AD-65492 is more efficacious that AD-66017 at the 1 mg/kg dose. In addition, the graphs demonstrate that the nadir of TTR expression is achieved between Days 35 and 42 for both iRNA agents at 1 mg/kg, with greater than 85% suppression prior to the second monthly dose of AD-65492, and about 70% suppression prior to the second monthly dose of AD-66017. Maintenance of about 95% and 85% suppression following the third and fourth monthly doses for AD-65492 and AD-66017, respectively, was achieved.

[0608] Furthermore, as demonstrated in FIG. 10A, monthly dosing (QMx4) of AD-65492 results in maintenance of greater than 95% TTR suppression and, as demonstrated in FIG. 10B, multi-dosing (QMx4) of AD-66017 is additive at the 1 mg/kg dose. FIG. 10B also demonstrates that there is 85% suppression of TTR protein expression following the second monthly dose of AD-66017 and that this suppression is maintained with the third and fourth monthly doses.

### Example 6. Design and Synthesis of Chemically Modified Agents Targeting TTR

[0609] Additional double stranded RNAi agents targeting TTR in which substantially all of the sense strand nucleotides and substantially all of the antisense strand nucleotides are modified nucleotides and comprising an antisense strand comprising a region of complementary to SEQ ID NO:2 were designed and synthesized as described above.

[0610] The nucleotide sequences of the sense and antisense strands of these agents are provided in Table 5.

### Example 7. Design and Synthesis of Chemically Modified Agents Targeting TTR

[0611] Additional double stranded RNAi agents targeting TTR were designed and synthesized as described above.

[0612] The nucleotide sequences of the unmodified sense and antisense strands of these agents are provided in Table 6, and the nucleotide sequences of the modified sense and antisense strands of these agents are provided in Table 7.

TABLE 5
Modified Sense and Antisense Strand Sequences of TTR dsRNAs

| | Sense | | | | | |
|---|---|---|---|---|---|---|
| | strand | Sense sequence | SEQ | Antisense | Antisense sequence | SEQ ID |
| DuplexID | ID | 5′-3′ | ID NO | ID | 5′-3′ | NO |
| AD-65496 | A-131354 | usgsggauUfuCfAfUfguaaccaagaL96 | 51 | A-131360 | PusCfsuugGfuuAfcaugAfaAfucccasusc | 93 |
| AD-65488 | A-131354 | usgsggauUfuCfAfUfguaaccaagaL96 | 52 | A-131358 | PusCfsuugGfuuacaugAfaAfucccasusc | 94 |
| AD-65474 | A-131354 | usgsggauUfuCfAfUfguaaccaagaL96 | 53 | A-131362 | PusCfsuugGfuuAfcaugAfAfaucccasusc | 95 |
| AD-65478 | A-131354 | usgsggauUfuCfAfUfguaaccaagaL96 | 54 | A-131363 | UfsCfsuugGfuuAfcaugAfAfaucccasusc | 96 |
| AD-65493 | A-128512 | usgsggauuucadTguaacaaagaL96 | 55 | A-131366 | PusCfsuugguuacaugAfaaucccasusc | 97 |
| AD-65481 | A-131354 | usgsggauUfuCfAfUfguaaccaagaL96 | 56 | A-131364 | UfsCfsuugGfuuacaugAfaAfucccasusc | 98 |
| AD-65489 | A-131365 | usgggauuucadTguaacaaagaL96 | 57 | A-128520 | usCfsuugguuacaugAfaaucccasusc | 99 |
| AD-65495 | A-131353 | usgsggauUfuCfAfUfguaaCfcaagaL96 | 58 | A-128516 | usCfsuugGfuUfAfcaugAfaAfucccasusc | 100 |
| AD-65482 | A-131373 | usasggauUfuCfAfUfguaaccaagaL96 | 59 | A-131374 | usCfsuugGfuuacaugAfaAfuccuasusu | 101 |
| AD-65468 | A-131354 | usgsggauUfuCfAfUfguaaccaagaL96 | 60 | A-128516 | usCfsuugGfuUfAfcaugAfaAfucccasusc | 102 |
| AD-65367 | A-128499 | usgsggAfuUfuCfAfUfgUfaaccaagAfL96 | 61 | A-128520 | usCfsuugguuacaugAfaaucccasusc | 103 |
| AD-65485 | A-128512 | usgsggauuucadTguaacaaagaL96 | 62 | A-128520 | usCfsuugguuacaugAfaaucccasusc | 104 |
| AD-65470 | A-131367 | gsgsauUfuCfAfUfguaaccaagaL96 | 63 | A-131369 | usCfsuugguuacaugAfaauccscsa | 105 |
| AD-65469 | A-131354 | usgsggauUfuCfAfUfguaaccaagaL96 | 64 | A-131361 | usCfsuugGfuuAfcaugAfAfaucccasusc | 106 |
| AD-65473 | A-131355 | usgggauUfuCfAfUfguaaccaagaL96 | 65 | A-131356 | usCfuugGfuUfAfcaugAfaAfucccasusc | 107 |
| AD-65484 | A-131355 | usgggauUfuCfAfUfguaaccaagaL96 | 66 | A-131357 | usCfuugGfuuacaugAfaAfucccasusc | 108 |
| AD-65477 | A-131353 | usgsggauUfuCfAfUfguaaCfcaagaL96 | 67 | A-128517 | usCfsuugGfuuacaugAfaAfucccasusc | 109 |
| AD-65497 | A-131367 | gsgsauUfuCfAfUfguaaccaagaL96 | 68 | A-131368 | usCfsuugguuacaugAfaauccsusa | 110 |
| AD-65475 | A-131370 | gsgauUfuCfAfUfguaaccaagaL96 | 69 | A-131371 | usCfuugguuacaugAfaauccscsa | 111 |
| AD-65480 | A-131354 | usgsggauUfuCfAfUfguaaccaagaL96 | 70 | A-128517 | usCfsuugGfuuacaugAfaAfucccasusc | 112 |
| AD-65479 | A-131372 | gsgsauuucAfUfguaaccaagaL96 | 71 | A-131369 | usCfsuugguuacaugAfaauccscsa | 113 |
| AD-65492 | | usgsggauUfuCfAfUfguaaccaagaL96 | 72 | | usCfsuugGfuuAfcaugAfaAfucccasusc | 114 |
| AD-65494 | A-1285120 | usgsggauuucadTguaacaaagaL96 | 73 | A-128526 | PusdCsuugguuadCaugdAaaucccasusc | 115 |
| AD-65499 | A-128557 | usgsggauuucadTguaacY34aagaL96 | 74 | A-128526 | PusdCsuugguuadCaugdAaaucccasusc | 116 |
| AD-65491 | A-128557 | usgsggauuucadTguaacY34aagaL96 | 75 | A-128525 | usdCsuugguuadCaugdAaaucccasusc | 117 |
| AD-65498 | A-1285121 | usgsggauuucadTguaacaaagaL96 | 76 | A-131375 | UfsdCsuugguuadCaugdAaaucccasusc | 118 |
| AD-65490 | A-128512 | usgsggauuucadTguaacaaagaL96 | 77 | A-128553 | usdCsuugguuadCsaugdAsaaucccasusc | 119 |
| AD-64520 | A-128557 | usgsggauuucadTguaacY34aagaL96 | 78 | A-128553 | usdCsuugguuadCsaugdAsaaucccasusc | 120 |
| AD-64527 | A-128512 | usgsggauuucadTguaacaaagaL96 | 79 | A-128525 | usdCsuugguuadCaugdAaaucccasusc | 121 |
| AD-65472 | A-131376 | gsgsauuucadTguaacaaagaL96 | 80 | A-131377 | usdCsuugguuadCaugdAaauccscsa | 122 |
| AD-65486 | A-128557 | usgsggauuucadTguaacY34aagaL96 | 81 | A-128520 | usCfsuugguuacaugAfaaucccasusc | 123 |
| AD-65472 | A-131376 | gsgsauuucadTguaacaaagaL96 | 82 | A-131377 | usdCsuugguuadCaugdAaauccscsa | 124 |
| AD-64515 | | usgsggauuucadTguaac(Cgn)aagaL96 | 83 | | usdCsuugguuadCaugdAaaucccasusc | 125 |
| AD-64536 | | usgsggauuucadTguaac(Cgn)aagaL96 | 84 | | usdCsuugguuadCsaugdAsaaucccasusc | 126 |
| AD-65471 | | usgsggauuucadTguaac(Cgn)aagaL96 | 85 | | usCfsuugguuacaugAfaaucccasusc | 127 |
| AD-65483 | | usgsggauuucadTguaac(Cgn)aagaL96 | 86 | | PusdCsuugguuadCaugdAaaucccasusc | 128 |
| AD-59152 | A-106305 | UfgGfgAfuUfuCAfUfgUfaacCfaAfgAf | 87 | A-119923 | PuCfuUfgGfUfUfaCfaugAfaAfuCfcCfas | 129 |
| | | L96 | | | Ufsc | |
| AD-65476 | A-106305 | UfgGfgAfuUfuCfAfUfgUfaacCfaAfgAf | 88 | A-131351 | UfCfuUfgGfUfUfaCfaugAfaAfuCfcCfas | 130 |
| | | L96 | | | Ufsc | |
| AD-64480 | A-128493 | UfsgsGfgAfuUfuCfAfUfgUfaAfcCfaAf | 89 | A-128495 | PusCfsuUfgGfuUfaCfaugAfaAfuCfcCfas | 131 |
| | | gAfL96 | | | use | |
| AD-51547 | A-106305 | UfgGfgAfuUfuCfAfUfgUfaacCfaAfgAf | 90 | A-1029782 | uCfuUfgGfUfUfaCfaugAfaAfuCfcCfasU | 132 |
| | | L96 | | | fsc | |
| AD-65487 | A-1284937 | UfsgsGfgAfuUfuCfAfUfgUfaAfcCfaAf | 91 | A-131352 | UfsCfsuUfgGfuUfaCfaugAfaAfuCfcCfas | 133 |
| | | gAfL96 | | | use | |
| AD-64474 | A-1284935 | UfsgsGfgAfuUfuCfAfUfgUfaAfcCfaAf | 92 | A-1284947 | usCfsuUfgGfuUfaCfaugAfaAfuCfcCfasu | 134 |
| | | gAfL96 | | | sc | |

TABLE 6
Unmodified Sense and Antisense Strand Sequences of TTR dsRNAs

| | | | Antisense Start | | |
|---|---|---|---|---|---|
| | | SEQ | Site Relative | | SEQ |
| Duplex | Sense sequence | ID | to | Antisense sequence | ID |
| ID | (5′ to 3′) | NO | NM_000371.2 | (5′ to 3′) | NO |
| AD-68322 | AUGGGAUUUCAUGUAACCAAA | 135 | 504 | UUUGGUUACAUGAAAUCCCAUCC | 167 |
| AD-60668 | AUGGGAUUUCAUGUAACCAAA | 136 | 504 | UUUGGUUACAUGAAAUCCCAUCC | 168 |
| AD-68330 | AUGGGAUUUCAUGUAACCAAA | 137 | 504 | UUUGGUUACAUGAAAUCCCAUCC | 169 |
| AD-64474 | UGGGAUUUCAUGUAACCAAGA | 138 | 505 | UCUUGGUUACAUGAAAUCCCAUC | 170 |
| AD-65468 | UGGGAUUUCAUGUAACCAAGA | 139 | 505 | UCUUGGUUACAUGAAAUCCCAUC | 171 |
| AD-65492 | UGGGAUUUCAUGUAACCAAGA | 140 | 505 | UCUUGGUUACAUGAAAUCCCAUC | 172 |
| AD-65480 | UGGGAUUUCAUGUAACCAAGA | 141 | 505 | UCUUGGUUACAUGAAAUCCCAUC | 173 |
| AD-60636 | UUUCAUGUAACCAAGAGUAUU | 142 | 510 | AAUACUCUUGGUUACAUGAAAUC | 174 |
| AD-68320 | UUUCAUGUAACCAAGAGUAUU | 143 | 510 | AAUACUCUUGGUUACAUGAAAUC | 175 |
| AD-68326 | UUUCAUGUAACCAAGAGUAUU | 144 | 510 | AAUACUCUUGGUUACAUGAAAUC | 176 |
| AD-60611 | UGUAACCAAGAGUAUUCCAUU | 145 | 515 | AAUGGAAUACUCUUGGUUACAUG | 177 |
| AD-68331 | UGUAACCAAGAGUAUUCCAUU | 146 | 515 | AAUGGAAUACUCUUGGUUACAUG | 178 |
| AD-68315 | UGUAACCAAGAGUAUUCCAUU | 147 | 515 | AAUGGAAUACUCUUGGUUACAUG | 179 |
| AD-68319 | AACCAAGAGUAUUCCAUUUUU | 148 | 518 | AAAAAUGGAAUACUCUUGGUUAC | 180 |
| AD-60612 | AACCAAGAGUAUUCCAUUUUU | 149 | 518 | AAAAAUGGAAUACUCUUGGUUAC | 181 |
| AD-68316 | AACCAAGAGUAUUCCAUUUUU | 150 | 518 | AAAAAUGGAAUACUCUUGGUUAC | 182 |
| AD-60664 | UUUUUACUAAAGCAGUGUUUU | 151 | 534 | AAAACACUGCUUUAGUAAAAAUG | 183 |
| AD-68321 | UUUUUACUAAAGCAGUGUUUU | 152 | 534 | AAAACACUGCUUUAGUAAAAAUG | 184 |
| AD-68318 | UUUUUACUAAAGCAGUGUUUU | 153 | 534 | AAAACACUGCUUUAGUAAAAAUG | 185 |
| AD-60665 | UUACUAAAGCAGUGUUUUCAA | 154 | 537 | UUGAAAACACUGCUUUAGUAAAA | 186 |
| AD-60642 | CUAAAGCAGUGUUUUCACCUA | 155 | 540 | UAGGUGAAAACACUGCUUUAGUA | 187 |
| AD-68329 | CUAAAGCAGUGUUUUCACCUA | 156 | 540 | UAGGUGAAAACACUGCUUUAGUA | 188 |
| AD-68334 | CUAAAGCAGUGUUUUCACCUA | 157 | 540 | UAGGUGAAAACACUGCUUUAGUA | 189 |
| AD-68328 | GGCAGAGACAAUAAAACAUUA | 158 | 582 | UAAUGUUUUAUUGUCUCUGCCUG | 190 |
| AD-68333 | GGCAGAGACAAUAAAACAUUA | 159 | 582 | UAAUGUUUUAUUGUCUCUGCCUG | 191 |
| AD-60639 | GGCAGAGACAAUAAAACAUUA | 160 | 582 | UAAUGUUUUAUUGUCUCUGCCUG | 192 |
| AD-60643 | CAGAGACAAUAAAACAUUCCU | 161 | 584 | AGGAAUGUUUUAUUGUCUCUGCC | 193 |
| AD-68317 | CAGAGACAAUAAAACAUUCCU | 162 | 584 | AGGAAUGUUUUAUUGUCUCUGCC | 194 |
| AD-68335 | CAGAGACAAUAAAACAUUCCU | 163 | 584 | AGGAAUGUUUUAUUGUCUCUGCC | 195 |
| AD-68327 | CAAUAAAACAUUCCUGUGAAA | 164 | 590 | UUUCACAGGAAUGUUUUAUUGUC | 196 |
| AD-68332 | CAAUAAAACAUUCCUGUGAAA | 165 | 590 | UUUCACAGGAAUGUUUUAUUGUC | 197 |
| AD-60637 | CAAUAAAACAUUCCUGUGAAA | 166 | 590 | UUUCACAGGAAUGUUUUAUUGUC | 198 |

TABLE 7
Modified Sense and Antisense Strand Sequences of TTR dsRNAs

| | | SEQ | | SEQ |
|---|---|---|---|---|
| Duplex | | ID | | ID |
| ID | Sense sequence (5′ to 3′) | NO | Antisense sequence (5′ to 3′) | NO |
| AD-68322 | asusgggaUfuUfCfAfuguaaccaaaL96 | 199 | usUfsuggUfuAfCfaugaAfaUfcccauscsc | 231 |
| AD-60668 | AfsusGfgGfaUfuUfCfAfuGfuAfaCfcAfaAfL96 | 200 | usUfsuGfgUfuAfcAfugaAfaUfcCfcAfuscsc | 232 |
| AD-68330 | asusgggaUfuUfCfAfuguaaccaaaL96 | 201 | usUfsuggUfuacaugaAfaUfcccauscsc | 233 |
| AD-64474 | UfsgsGfgAfuUfuCfAfUfgUfaAfcCfaAfgAfL96 | 202 | usCfsuUfgGfuUfaCfaugAfaAfuCfcCfasusc | 234 |
| AD-65468 | usgsggauUfuCfAfUfguaaccaagaL96 | 203 | usCfsuugGfuUfAfcaugAfaAfucccasusc | 235 |
| AD-65492 | usgsggauUfuCfAfUfguaaccaagaL96 | 204 | usCfsuugGfuuAfcaugAfaAfucccasusc | 236 |
| AD-65480 | usgsggauUfuCfAfUfguaaccaagaL96 | 205 | usCfsuugGfuuacaugAfaAfucccasusc | 237 |
| AD-60636 | UfsusUfcAfuGfuAfAfCfcAfaGfaGfuAfuUfL96 | 206 | asAfsuAfcUfcUfuGfguuAfcAfuGfaAfasusc | 238 |
| AD-68320 | ususucauGfuAfAfCfcaagaguauuL96 | 207 | asAfsuacUfcUfUfgguuAfcAfugaaasusc | 239 |
| AD-68326 | ususucauGfuAfAfCfcaagaguauuL96 | 208 | asAfsuacUfcuugguuAfcAfugaaasusc | 240 |
| AD-60611 | UfsgsUfaAfcCfaAfGfAfgUfaUfuCfcAfuUfL96 | 209 | asAfsuGfgAfaUfaCfucuUfgGfuUfaCfasusg | 241 |
| AD-68331 | usgsuaacCfaAfGfAfguauuccauuL96 | 210 | asAfsuggAfaUfAfcucuUfgGfuuacasusg | 242 |
| AD-68315 | usgsuaacCfaAfGfAfguauuccauuL96 | 211 | asAfsuggAfauacucuUfgGfuuacasusg | 243 |
| AD-68319 | asasccaaGfaGfUfAfuuccauuuuuL96 | 212 | asAfsaaaUfgGfAfauacUfcUfugguusasc | 244 |
| AD-60612 | AfsasCfcAfaGfaGfUfAfuUfcCfaUfuUfuUfL96 | 213 | asAfsaAfaUfgGfaAfuacUfcUfuGfgUfusasc | 245 |
| AD-68316 | asasccaaGfaGfUfAfuuccauuuuuL96 | 214 | asAfsaaaUfggaauacUfcUfugguusasc | 246 |
| AD-60664 | UfsusUfuUfaCfuAfAfAfgCfaGfuGfuUfuUfL96 | 215 | asAfsaAfcAfcUfgCfuuuAfgUfaAfaAfasusg | 247 |
| AD-68321 | ususuuuaCfuAfAfAfgcaguguuuuL96 | 216 | asAfsaacAfcUfGfcuuuAfgUfaaaaasusg | 248 |
| AD-68318 | ususuuuaCfuAfAfAfgcaguguuuuL96 | 217 | asAfsaacAfcugcuuuAfgUfaaaaasusg | 249 |
| AD-60665 | UfsusAfcUfaAfaGfCfAfgUfgUfuUfuCfaAfL96 | 218 | usUfsgAfaAfaCfaCfugcUfuUfaGfuAfasasa | 250 |
| AD-60642 | CfsusAfaAfgCfaGfUfGfuUfuUfcAfcCfuAfL96 | 219 | usAfsgGfuGfaAfaAfcacUfgCfuUfuAfgsusa | 251 |
| AD-68329 | csusaaagCfaGfUfGfuuuucaccuaL96 | 220 | usAfsgguGfaaaacacUfgCfuuuagsusa | 252 |
| AD-68334 | csusaaagCfaGfUfGfuuuucaccuaL96 | 221 | usAfsgguGfaAfAfacacUfgCfuuuagsusa | 253 |
| AD-68328 | gsgscagaGfaCfAfAfuaaaacauuaL96 | 222 | usAfsaugUfuuuauugUfcUfcugccsusg | 254 |
| AD-68333 | gsgscagaGfaCfAfAfuaaaacauuaL96 | 223 | usAfsaugUfuUfUfauugUfcUfcugccsusg | 255 |
| AD-60639 | GfsgsCfaGfaGfaCfAfAfuAfaAfaCfaUfuAfL96 | 224 | usAfsaUfgUfuUfuAfuugUfcUfcUfgCfcsusg | 256 |
| AD-60643 | CfsasGfaGfaCfaAfUfAfaAfaCfaUfuCfcUfL96 | 225 | asGfsgAfaUfgUfuUfuauUfgUfcUfcUfgscsc | 257 |
| AD-68317 | csasgagaCfaAfUfAfaaacauuccuL96 | 226 | asGfsgaaUfguuuuauUfgUfcucugscsc | 258 |
| AD-68335 | csasgagaCfaAfUfAfaaacauuccuL96 | 227 | asGfsgaaUfgUfUfuuauUfgUfcucugscsc | 259 |
| AD-68327 | csasauaaAfaCfAfUfuccugugaaaL96 | 228 | usUfsucaCfaggaaugUfuUfuauugsusc | 260 |
| AD-68332 | csasauaaAfaCfAfUfuccugugaaaL96 | 229 | usUfsucaCfaGfGfaaugUfuUfuauugsusc | 261 |
| AD-60637 | CfsasAfuAfaAfaCfAfUfuCfcUfgUfgAfaAfL96 | 230 | usUfsuCfaCfaGfgAfaugUfuUfuAfuUfgsusc | 262 |

### Example 8. Administration of AD-65492 to Cynomologous Monkeys

[0613] The efficacy of AD-65492 was further assessed by administration to Cynomologous monkeys.

[0614] In a first set of experiments, four Groups (Groups 1, 2, 3, and 7), were subcutaneously administered a single 0.3 mg/kg dose (Group 1); a single dose of 1 mg/kg (Group 2); a monthly dose of 1 mg/kg for 4 months (QMx4) (Group 7); or a monthly dose of 3 mg/kg for 4 months (QMx4) (Group 3).

[0615] Serum, plasma, and sparse liver samples were collected pre-dose and on days 3, 7, 10, 14, 21, 28, 35, 42, 49, 56, 63, 70, 77, 84, 91, 98, 112, 126, 154, 175, 203, 230, 260, 290, 310, 335, and 364 for Groups 3 and 4.

[0616] For Groups 1 and 2, serum was collected on days-7 and -1 pre-dose, and days 3, 7, 10, 14, 21, 28, 35, 42, 49, 56, 63, 70, 77, 84, 91, 105, and 119 post-dose; plasma was collected on day 1 pre-dose, and 0.5, 1, 2, 4, 8, 24, 48, 96 and 168 hours post-dose.

[0617] For Groups 3 and 7 serum was collected on days-7 and -1 pre-dose, and days 3, 7, 10, 14, 21, 28, 35, 42, 49, 56, 63, 70, 77, 84, 91, 98, 112, 127, 155, 176, 204, 232, 260, 288, 316, 344 and 372 post-dose; plasma was collected on day 1 pre-dose, and 0.5, 1, 2, 4, 8, 12, 24, 48, 96 and 168 hours post-dose; plasma was also collected on day 85 pre-dose and 0.5, 1, 2, 4, 8, 12, 24, 48, 96 and 168 hours post-dose.

[0618] For Group 7, sparse liver samples were collected on day 1, eight hours pre-dose (i.e., 8 hours before the dose of AD-65492 was administered to the subject, a sparse liver sample was collected from the subject); and on post-dose day 7; day 22; day 29, eight hours pre-dose; day 57, eight hours pre-dose; day 85, eight hours pre-dose; day 91; day 106; and day 141.

[0619] For Group 3, sparse liver samples were collected post-dose on day 29, eight hours pre-dose; day 57, eight hours pre-dose; day 85, eight hours pre-dose; day 91, day 106, and day 141.

[0620] The serum level of TTR protein was determined as described above.

[0621] FIG. 11 provides the results of these studies, and shows robust suppression of TTR expression achieved by administration of AD-65492. The data demonstrate that AD-65492 provides greater than 90% sustained suppression of TTR expression for approximately 6 weeks and 17 weeks post-final dose following monthly dosing for four months (QMx4) with 1 mg/kg (Group 7) of AD-65492 or 3 mg/kg of AD-65492 (Group 3), respectively. The data also demonstrate about 40% suppression of TTR expression at 17 weeks post-final dose following monthly dosing for four months (QMx4) with 1 mg/kg of AD-65492 (Group 7).

[0622] The data indicate that quarterly dosing of human subjects with AD-65492 would be effective in suppressing TTR expression at a dose level intermediate to 1 mg/kg and 3 mg/kg, e.g., 2 mg/kg, assuming a 1:1 translation between dosing in Cynomologous monkeys and humans.

[0623] In a second set of experiments, three Groups (Groups 9, 10, and 11; see FIG. 12), were subcutaneously administered a monthly dose of either 0.3 mg/kg for 6 months (QMx6) (Group 9); a monthly dose of 0.6 mg/kg for 6 months (QMx6) (Group 10); or an initial dose of 1 mg/kg followed by a monthly maintenance dose of 0.3 mg/kg for one month (QMx1) after the initial dose for five months (QMx5) (Group 11).

[0624] Serum samples were collected on days-7 and -1 pre-dose, and days 4, 8, 11, 15, 22, 29, 36, 43, 50, 57, 64, 71, 78, 85, 92, 99, 113, 127, 155, 176, and 204, 232, 260 and 288. post-dose. The serum level of TTR protein was determined as described above.

[0625] FIG. 13 provides the results of these studies, and demonstrates robust suppression of TTR achieved by AD-65492 after a monthly dose of 0.6 mg/kg for two months (QMx2), which is comparable to suppression of TTR expression following a 1 mg/kg initial dose. The data also demonstrate that AD-65492 provides about 80% sustained suppression of TTR expression after monthly dosing for two months at 0.3 mg/kg; three out of four monkeys achieved 60%-85% TTR suppression following a monthly 0.3 mg/kg does of AD-65492 for two months. Up to 90% suppression of TTR expression was demonstrated following a single 1 mg/kg dose, with a second dose of 0.3 mg/kg maintaining nadir for three weeks post dose second dose.

### EQUIVALENTS

[0626] Those skilled in the art will recognize, or be able to ascertain using no more than routine experimentation, many equivalents to the specific embodiments and methods described herein. Such equivalents are intended to be encompassed by the scope of the following claims.

1. A double stranded ribonucleic acid (RNAi) agent, or salt thereof, for inhibiting expression of transthyretin (TTR) in a cell, wherein the RNAi agent comprises a sense strand and an antisense strand forming a double stranded region, wherein the sense strand comprises the nucleotide sequence 5′-UGGGAUUUCAUGUAACCAAGA-3′ of SEQ ID NO:2 and the antisense strand comprises the nucleotide sequence 5′-UCUUGGUUACAUGAAAUCCCAUC-3′ of SEQ ID NO:3,
wherein each strand is 14 to 30 nucleotides in length,
wherein all of the nucleotides of the sense strand and all of the nucleotides of the antisense strand are modified nucleotides,
wherein the sense strand comprises no more than 8 2′-fluoro modifications;
wherein the antisense strand comprises no more than 6 2′-fluoro modifications;
wherein the sense strand and the antisense strand each independently comprise two phosphorothioate linkages at the 5′-terminus; and
wherein the sense strand is conjugated to at least one ligand.

2. (canceled)

3. (canceled)

4. The double stranded RNAi agent, or salt thereof, of claim 1, wherein the modified nucleotides are selected from the group consisting of a deoxy-nucleotide, a 3′-terminal deoxy-thymine (dT) nucleotide, a 2′-O-methyl modified nucleotide, a 2′-fluoro modified nucleotide, a 2′-deoxy-modified nucleotide, a locked nucleotide, an unlocked nucleotide, a conformationally restricted nucleotide, a constrained ethyl nucleotide, an abasic nucleotide, a 2′-amino-modified nucleotide, a 2′-O-allyl-modified nucleotide, 2′-C-alkyl-modified nucleotide, 2′-hydroxly-modified nucleotide, a 2′-methoxyethyl modified nucleotide, a 2′-O-alkyl-modified nucleotide, a morpholino nucleotide, a phosphoramidate, a non-natural base comprising nucleotide, a tetrahydropyran modified nucleotide, a 1,5-anhydrohexitol modified nucleotide, a cyclohexenyl modified nucleotide, a nucleotide comprising a phosphorothioate group, a nucleotide comprising a methylphosphonate group, a nucleotide comprising a 5′-phosphate, and a nucleotide comprising a 5′-phosphate mimic, and combinations thereof.

5. The double stranded RNAi agent, or salt thereof, of claim 1, wherein the ligand is one or more GalNAc derivatives attached through a bivalent or trivalent branched linker.

6. The double stranded RNAi agent, or salt thereof, of claim 1, wherein the ligand is

[chemical structure]

7. The double stranded RNAi agent, or salt thereof, of claim 1, wherein the ligand is conjugated to the 3′ end of the sense strand.

8. The double stranded RNAi agent, or salt thereof, of claim 7, wherein the RNAi agent is conjugated to the ligand as shown in the following schematic [chemical structure]
wherein X is O or S.

9. The double stranded RNAi agent, or salt thereof, of claim 1, wherein the antisense strand comprises a nucleotide sequence selected from the group consisting of
5′-usCfsuugguuacaugAfaaucccasusc-3′ of SEQ ID NO: 6,
5′-usCfsuugGfuuAfcaugAfaAfucccasusc-3′ of SEQ ID NO: 7,
5′-UfsCfsuugGfuuAfcaugAfaAfucccasusc-3′ of SEQ ID NO: 8, and
5′-VPusCfsuugGfuuAfcaugAfaAfucccasusc-3′ of SEQ ID NO: 9, wherein a, c, g, and u are 2′-O-methyl (2′-OMe) A, C, G, or U, respectively; Af, Cf, Gf, and Uf are 2′-fluoro A, C, G, or U, respectively; s is a phosphorothioate linkage; and VP is a 5′-phosphate mimic.

10. The double stranded RNAi agent, or salt thereof, of claim 1, wherein the sense and antisense strands comprise nucleotide sequences selected from the group consisting of
(i) 5′-usgsggauUfuCfAfUfguaaccaaga-3′ of SEQ ID NO: 10 and 5′-usCfsuugguuacaugAfaaucccasusc-3′ of SEQ ID NO: 6;
(ii) 5′-usgsggauUfuCfAfUfguaaccaaga-3′ of SEQ ID NO: 10 and 5′-usCfsuugGfuuAfcaugAfaAfucccasusc-3′ of SEQ ID NO: 7;
(iii) 5′-usgsggauUfuCfAfUfguaaccaaga-3′ of SEQ ID NO: 10 and 5′-UfsCfsuugGfuuAfcaugAfaAfucccasusc-3′ of SEQ ID NO: 8; and
(iv) 5′-usgsggauUfuCfAfUfguaaccaaga-3′ of SEQ ID NO: 10 and 5′-VPusCfsuugGfuuAfcaugAfaAfucccasusc-3′ of SEQ ID NO: 99, wherein a, c, g, and u are 2′-O-methyl (2′-OMe) A, C, G, or U, respectively; Af, Cf, Gf, and Uf are 2′-fluoro A, C, G, or U, respectively; s is a phosphorothioate linkage; and VP is a 5′-phosphate mimic.

11. The double stranded RNAi agent, or salt thereof, of claim 10, wherein the antisense strand comprises the nucleotide sequence sequences
5′- usCfsuugGfuuAfcaugAfaAfucccasusc - 3′ of (SEQ
ID NO: 7),
wherein a, c, g, and u are 2′-O-methyl (2′-OMe) A, C, G, or U, respectively; Af, Cf, Gf, and Uf are 2′-fluoro A, C, G, or U, respectively; and s is a phosphorothioate linkage.

12-15. (canceled)

16. A pharmaceutical composition comprising the double stranded RNAi agent, or salt thereof, of claim 1.

17. A method of inhibiting transthyretin (TTR) expression in a cell, the method comprising:
contacting the cell with the double stranded RNAi agent, or salt thereof, of claim 1, thereby inhibiting expression of the TTR gene in the cell.

18. (canceled)

19. (canceled)

20. (canceled)

21. A method of treating a subject suffering from a TTR-associated disease or at risk for developing a TTR-associated disease, comprising administering to the subject a therapeutically effective amount or a prophylactically effective amount of the double stranded RNAi agent, or salt thereof, of claim 1, thereby treating the subject.

22. The method of claim 21, wherein a Neuropathy Impairment Score (NIS) or a modified NIS (mNIS+7) is reduced, slowed, or arrested in the subject suffering from a TTR-associated disease or at risk for developing a TTR-associated disease.

23. The method of claim 21, wherein a 6-minute walk test (6MWT) is increased in the subject suffering from a TTR-associated disease or at risk for developing a TTR-associated disease.

24-28. (canceled)

29. The method of claim 21, wherein the TTR-associated disease is selected from the group consisting of senile systemic amyloidosis (SSA, systemic familial amyloidosis, familial amyloidotic polyneuropathy (FAP, familial amyloidotic cardiomyopathy (FAC, leptomeningeal/Central Nervous System (CNS) amyloidosis, and hyperthyroxinemia.

30. (canceled)

31. The method of claim 21, wherein the double stranded RNAi agent, or salt thereof, is administered to the subject via subcutaneous administration.

32-36. (canceled)

37. The double stranded RNAi agent, or salt thereof, of claim 1, wherein the sense strand comprises no more than 6 2′-fluoro modifications.

38. The double stranded RNAi agent, or salt thereof, of claim 1, wherein the sense strand comprises no more than 5 2′-fluoro modifications.

39. The double stranded RNAi agent, or salt thereof, of claim 1, wherein the sense strand comprises no more than 4 2′-fluoro modifications.

40. The double stranded RNAi agent, or salt thereof, of claim 1, wherein the antisense strand comprises no more than 5 2′-fluoro modifications.

The application's sequence listing, which the Patent Office published only in electronic form, follows.

SEQUENCE LISTING (262 sequences)

SEQ ID NO: 1 - DNA, 938 bp, Homo sapiens
  source 1..938: mol_type = genomic DNA
gttgactaagtcaataatcagaatcagcaggtttgcagtcagattggcagggataagcagcctagctcaggagaagtgagtataaaagccccaggctgggagcagccatcacagaagtccactcattcttggcaggatggcttctcatcgtctgctcctcctctgccttgctggactggtatttgtgtctgaggctggccctacgggcaccggtgaatccaagtgtcctctgatggtcaaagttctagatgctgtccgaggcagtcctgccatcaatgtggccgtgcatgtgttcagaaaggctgctgatgacacctgggagccatttgcctctgggaaaaccagtgagtctggagagctgcatgggctcacaactgaggaggaatttgtagaagggatatacaaagtggaaatagacaccaaatcttactggaaggcacttggcatctccccattccatgagcatgcagaggtggtattcacagccaacgactccggcccccgccgctacaccattgccgccctgctgagcccctactcctattccaccacggctgtcgtcaccaatcccaaggaatgagggacttctcctccagtggacctgaaggacgagggatgggatttcatgtaaccaagagtattccatttttactaaagcagtgttttcacctcatatgctatgttagaagtccaggcagagacaataaaacattcctgtgaaaggcacttttcattccactttaacttgattttttaaattcccttattgtcccttccaaaaaaaagagaatcaaaattttacaaagaatcaaaggaattctagaaagtatctgggcagaacgctaggagagatccaaatttccattgtcttgcaagcaaagcacgtattaaatatgatctgcagccattaaaaagacacattctgtaaaaaaaaaaaa

SEQ ID NO: 2 - RNA, 21 nt, synthetic construct
  misc_feature 1..21: note = Description of Artificial Sequence: Synthetic oligonucleotide
  source 1..21: mol_type = other RNA
tgggatttcatgtaaccaaga

SEQ ID NO: 3 - RNA, 23 nt, synthetic construct
  misc_feature 1..23: note = Description of Artificial Sequence: Synthetic oligonucleotide
  source 1..23: mol_type = other RNA
tcttggttacatgaaatcccatc

SEQ ID NO: 4 - DNA, 23 bp, synthetic construct
  misc_feature 1..23: note = Description of Artificial Sequence: Synthetic oligonucleotide
  source 1..23: mol_type = other DNA
gatgggatttcatgtaaccaaga

SEQ ID NO: 5 - DNA, 650 bp, Homo sapiens
  source 1..650: mol_type = genomic DNA
acagaagtccactcattcttggcaggatggcttctcatcgtctgctcctcctctgccttgctggactggtatttgtgtctgaggctggccctacgggcaccggtgaatccaagtgtcctctgatggtcaaagttctagatgctgtccgaggcagtcctgccatcaatgtggccgtgcatgtgttcagaaaggctgctgatgacacctgggagccatttgcctctgggaaaaccagtgagtctggagagctgcatgggctcacaactgaggaggaatttgtagaagggatatacaaagtggaaatagacaccaaatcttactggaaggcacttggcatctccccattccatgagcatgcagaggtggtattcacagccaacgactccggcccccgccgctacaccattgccgccctgctgagcccctactcctattccaccacggctgtcgtcaccaatcccaaggaatgagggacttctcctccagtggacctgaaggacgagggatgggatttcatgtaaccaagagtattccatttttactaaagcagtgttttcacctcatatgctatgttagaagtccaggcagagacaataaaacattcctgtgaaaggcacttttcattccaaaaaaaaaaaaaaaaaaaaaaa

SEQ ID NO: 6 - RNA, 23 nt, synthetic construct
  misc_feature 1..23: note = Description of Artificial Sequence: Synthetic oligonucleotide
  source 1..23: mol_type = other RNA
tcttggttacatgaaatcccatc

SEQ ID NO: 7 - RNA, 23 nt, synthetic construct
  misc_feature 1..23: note = Description of Artificial Sequence: Synthetic oligonucleotide
  source 1..23: mol_type = other RNA
tcttggttacatgaaatcccatc

SEQ ID NO: 8 - RNA, 23 nt, synthetic construct
  misc_feature 1..23: note = Description of Artificial Sequence: Synthetic oligonucleotide
  source 1..23: mol_type = other RNA
tcttggttacatgaaatcccatc

SEQ ID NO: 9 - RNA, 23 nt, synthetic construct
  misc_feature 1..23: note = Description of Artificial Sequence: Synthetic oligonucleotide
  source 1..23: mol_type = other RNA
tcttggttacatgaaatcccatc

SEQ ID NO: 10 - RNA, 21 nt, synthetic construct
  misc_feature 1..21: note = Description of Artificial Sequence: Synthetic oligonucleotide
  source 1..21: mol_type = other RNA
tgggatttcatgtaaccaaga

SEQ ID NO: 11 - protein, 16 aa, unidentified
  REGION 1..16: note = Description of Unknown: RFGF peptide
AAVALLPAVLLALLAP

SEQ ID NO: 12 - protein, 11 aa, unidentified
  REGION 1..11: note = Description of Unknown: RFGF analogue peptide
AALLPVLLAAP

SEQ ID NO: 13 - protein, 13 aa, Human immunodeficiency virus
GRKKRRQRRRPPQ

SEQ ID NO: 14 - protein, 16 aa, Drosophila sp.
RQIKIWFQNRRMKWKK

SEQ ID NO: 15 - RNA, 21 nt, synthetic construct
  source 1..21: mol_type = other RNA
  modified_base 1: mod_base = OTHER; note = 2'-deoxy-2'-fluorouridine-3'-phosphate
  modified_base 2: mod_base = OTHER; note = 2'-O-methylguanosine-3'-phosphate
  modified_base 3: mod_base = OTHER; note = 2'-deoxy-2'-fluoroguanosine-3'-phosphate
  modified_base 4: mod_base = OTHER; note = 2'-O-methylguanosine-3'-phosphate
  modified_base 5: mod_base = OTHER; note = 2'-deoxy-2'-fluoroadenosine-3'-phosphate
  modified_base 6: mod_base = OTHER; note = 2'-O-methyluridine-3'-phosphate
  modified_base 7: mod_base = OTHER; note = 2'-deoxy-2'-fluorouridine-3'-phosphate
  modified_base 8: mod_base = OTHER; note = 2'-O-methyluridine-3'-phosphate
  modified_base 9: mod_base = OTHER; note = 2'-deoxy-2'-fluorocytidine-3'-phosphate
  modified_base 10: mod_base = OTHER; note = 2'-deoxy-2'-fluoroadenosine-3'-phosphate
  modified_base 11: mod_base = OTHER; note = 2'-deoxy-2'-fluorouridine-3'-phosphate
  modified_base 12: mod_base = OTHER; note = 2'-O-methylguanosine-3'-phosphate
  modified_base 13: mod_base = OTHER; note = 2'-deoxy-2'-fluorouridine-3'-phosphate
  modified_base 14: mod_base = OTHER; note = 2'-O-methyladenosine-3'-phosphate
  modified_base 15: mod_base = OTHER; note = 2'-O-methyladenosine-3'-phosphate
  modified_base 16: mod_base = OTHER; note = 2'-O-methylcytidine-3'-phosphate
  modified_base 17: mod_base = OTHER; note = 2'-deoxy-2'-fluorocytidine-3'-phosphate
  modified_base 18: mod_base = OTHER; note = 2'-O-methyladenosine-3'-phosphate
  modified_base 19: mod_base = OTHER; note = 2'-deoxy-2'-fluoroadenosine-3'-phosphate
  modified_base 20: mod_base = OTHER; note = 2'-O-methylguanosine-3'-phosphate
  modified_base 21: mod_base = OTHER; note = 2'-deoxy-2'-fluoroadenosine-3'-phosphate ((2S,4R)-1-[29-[[2-(acetylamino)-2-deoxy-beta-D-galactopyra nosyl]oxy]-14,14-bis[[3-[[3-[[5-[[2-(acetylamino)-2-deoxy-b eta-D-galactopyranosyl]oxy]-1-oxopentyl]amino]propyl]amino] -3-oxopropoxy]methyl]-1,12,19,25-tetraoxo-16-oxa-13,20,24-t riazanonacos-1-yl]-4-hydroxy-2-pyrrolidinyl)methyl ester
tgggatttcatgtaaccaaga

SEQ ID NO: 16 - RNA, 21 nt, synthetic construct
  source 1..21: mol_type = other RNA
  modified_base 1: mod_base = OTHER; note = 2'-deoxy-2'-fluorouridine-3'-phosphorothioate
  modified_base 2: mod_base = OTHER; note = 2'-O-methylguanosine-3'-phosphorothioate
  modified_base 3: mod_base = OTHER; note = 2'-deoxy-2'-fluoroguanosine-3'-phosphate
  modified_base 4: mod_base = OTHER; note = 2'-O-methylguanosine-3'-phosphate
  modified_base 5: mod_base = OTHER; note = 2'-deoxy-2'-fluoroadenosine-3'-phosphate
  modified_base 6: mod_base = OTHER; note = 2'-O-methyluridine-3'-phosphate
  modified_base 7: mod_base = OTHER; note = 2'-deoxy-2'-fluorouridine-3'-phosphate
  modified_base 8: mod_base = OTHER; note = 2'-O-methyluridine-3'-phosphate
  modified_base 9: mod_base = OTHER; note = 2'-deoxy-2'-fluorocytidine-3'-phosphate
  modified_base 10: mod_base = OTHER; note = 2'-deoxy-2'-fluoroadenosine-3'-phosphate
  modified_base 11: mod_base = OTHER; note = 2'-deoxy-2'-fluorouridine-3'-phosphate
  modified_base 12: mod_base = OTHER; note = 2'-O-methylguanosine-3'-phosphate
  modified_base 13: mod_base = OTHER; note = 2'-deoxy-2'-fluorouridine-3'-phosphate
  modified_base 14: mod_base = OTHER; note = 2'-O-methyladenosine-3'-phosphate
  modified_base 15: mod_base = OTHER; note = 2'-O-methyladenosine-3'-phosphate
  modified_base 16: mod_base = OTHER; note = 2'-O-methylcytidine-3'-phosphate
  modified_base 17: mod_base = OTHER; note = 2'-deoxy-2'-fluorocytidine-3'-phosphate
  modified_base 18: mod_base = OTHER; note = 2'-O-methyladenosine-3'-phosphate
  modified_base 19: mod_base = OTHER; note = 2'-deoxy-2'-fluoroadenosine-3'-phosphate
  modified_base 20: mod_base = OTHER; note = 2'-O-methylguanosine-3'-phosphate
  modified_base 21: mod_base = OTHER; note = 2'-deoxy-2'-fluoroadenosine-3'-phosphate ((2S,4R)-1-[29-[[2-(acetylamino)-2-deoxy-beta-D-galactopyra nosyl]oxy]-14,14-bis[[3-[[3-[[5-[[2-(acetylamino)-2-deoxy-b eta-D-galactopyranosyl]oxy]-1-oxopentyl]amino]propyl]amino] -3-oxopropoxy]methyl]-1,12,19,25-tetraoxo-16-oxa-13,20,24-t riazanonacos-1-yl]-4-hydroxy-2-pyrrolidinyl)methyl ester
tgggatttcatgtaaccaaga

SEQ ID NO: 17 - DNA, 21 bp, synthetic construct
  source 1..21: mol_type = other DNA
  modified_base 1: mod_base = OTHER; note = 2'-O-methyluridine-3'-phosphorothioate
  modified_base 2: mod_base = OTHER; note = 2'-O-methylguanosine-3'-phosphorothioate
  modified_base 3: mod_base = OTHER; note = 2'-O-methylguanosine-3'-phosphate
  modified_base 4: mod_base = OTHER; note = 2'-O-methylguanosine-3'-phosphate
  modified_base 5: mod_base = OTHER; note = 2'-O-methyladenosine-3'-phosphate
  modified_base 6: mod_base = OTHER; note = 2'-O-methyluridine-3'-phosphate
  modified_base 7: mod_base = OTHER; note = 2'-O-methyluridine-3'-phosphate
  modified_base 8: mod_base = OTHER; note = 2'-O-methyluridine-3'-phosphate
  modified_base 9: mod_base = OTHER; note = 2'-O-methylcytidine-3'-phosphate
  modified_base 10: mod_base = OTHER; note = 2'-O-methyladenosine-3'-phosphate
  modified_base 12: mod_base = OTHER; note = 2'-O-methylguanosine-3'-phosphate
  modified_base 13: mod_base = OTHER; note = 2'-O-methyluridine-3'-phosphate
  modified_base 14: mod_base = OTHER; note = 2'-O-methyladenosine-3'-phosphate
  modified_base 15: mod_base = OTHER; note = 2'-O-methyladenosine-3'-phosphate
  modified_base 16: mod_base = OTHER; note = 2'-O-methylcytidine-3'-phosphate
  modified_base 17: mod_base = OTHER; note = 2'-O-methyladenosine-3'-phosphate
  modified_base 18: mod_base = OTHER; note = 2'-O-methyladenosine-3'-phosphate
  modified_base 19: mod_base = OTHER; note = 2'-O-methyladenosine-3'-phosphate
  modified_base 20: mod_base = OTHER; note = 2'-O-methylguanosine-3'-phosphate
  modified_base 21: mod_base = OTHER; note = 2'-O-methyladenosine-3'-phosphate ((2S,4R)-1-[29-[[2-(acetylamino)-2-deoxy-beta-D-galactopyra nosyl]oxy]-14,14-bis[[3-[[3-[[5-[[2-(acetylamino)-2-deoxy-b eta-D-galactopyranosyl]oxy]-1-oxopentyl]amino]propyl]amino] -3-oxopropoxy]methyl]-1,12,19,25-tetraoxo-16-oxa-13,20,24-t riazanonacos-1-yl]-4-hydroxy-2-pyrrolidinyl)methyl ester
  misc_feature 1..10: note = RNA
  misc_feature 12..21: note = RNA
  misc_feature 11: note = DNA
tgggatttcatgtaacaaaga

SEQ ID NO: 18 - RNA, 21 nt, synthetic construct
  source 1..21: mol_type = other RNA
  modified_base 1: mod_base = OTHER; note = 2'-O-methyluridine-3'-phosphorothioate
  modified_base 2: mod_base = OTHER; note = 2'-O-methylguanosine-3'-phosphorothioate
  modified_base 3: mod_base = OTHER; note = 2'-O-methylguanosine-3'-phosphate
  modified_base 4: mod_base = OTHER; note = 2'-O-methylguanosine-3'-phosphate
  modified_base 5: mod_base = OTHER; note = 2'-deoxy-2'-fluoroadenosine-3'-phosphate
  modified_base 6: mod_base = OTHER; note = 2'-O-methyluridine-3'-phosphate
  modified_base 7: mod_base = OTHER; note = 2'-deoxy-2'-fluorouridine-3'-phosphate
  modified_base 8: mod_base = OTHER; note = 2'-O-methyluridine-3'-phosphate
  modified_base 9: mod_base = OTHER; note = 2'-deoxy-2'-fluorocytidine-3'-phosphate
  modified_base 10: mod_base = OTHER; note = 2'-deoxy-2'-fluoroadenosine-3'-phosphate
  modified_base 11: mod_base = OTHER; note = 2'-deoxy-2'-fluorouridine-3'-phosphate
  modified_base 12: mod_base = OTHER; note = 2'-O-methylguanosine-3'-phosphate
  modified_base 13: mod_base = OTHER; note = 2'-deoxy-2'-fluorouridine-3'-phosphate
  modified_base 14: mod_base = OTHER; note = 2'-O-methyladenosine-3'-phosphate
  modified_base 15: mod_base = OTHER; note = 2'-O-methyladenosine-3'-phosphate
  modified_base 16: mod_base = OTHER; note = 2'-O-methylcytidine-3'-phosphate
  modified_base 17: mod_base = OTHER; note = 2'-O-methylcytidine-3'-phosphate
  modified_base 18: mod_base = OTHER; note = 2'-O-methyladenosine-3'-phosphate
  modified_base 19: mod_base = OTHER; note = 2'-O-methyladenosine-3'-phosphate
  modified_base 20: mod_base = OTHER; note = 2'-O-methylguanosine-3'-phosphate
  modified_base 21: mod_base = OTHER; note = 2'-deoxy-2'-fluoroadenosine-3'-phosphate ((2S,4R)-1-[29-[[2-(acetylamino)-2-deoxy-beta-D-galactopyra nosyl]oxy]-14,14-bis[[3-[[3-[[5-[[2-(acetylamino)-2-deoxy-b eta-D-galactopyranosyl]oxy]-1-oxopentyl]amino]propyl]amino] -3-oxopropoxy]methyl]-1,12,19,25-tetraoxo-16-oxa-13,20,24-t riazanonacos-1-yl]-4-hydroxy-2-pyrrolidinyl)methyl ester
tgggatttcatgtaaccaaga

SEQ ID NO: 19 - DNA, 21 bp, synthetic construct
  source 1..21: mol_type = other DNA
  modified_base 1: mod_base = OTHER; note = 2'-O-methyluridine-3'-phosphorothioate
  modified_base 2: mod_base = OTHER; note = 2'-O-methylguanosine-3'-phosphate
  modified_base 3: mod_base = OTHER; note = 2'-O-methylguanosine-3'-phosphate
  modified_base 4: mod_base = OTHER; note = 2'-O-methylguanosine-3'-phosphate
  modified_base 5: mod_base = OTHER; note = 2'-O-methyladenosine-3'-phosphate
  modified_base 6: mod_base = OTHER; note = 2'-O-methyluridine-3'-phosphate
  modified_base 7: mod_base = OTHER; note = 2'-O-methyluridine-3'-phosphate
  modified_base 8: mod_base = OTHER; note = 2'-O-methyluridine-3'-phosphate
  modified_base 9: mod_base = OTHER; note = 2'-O-methylcytidine-3'-phosphate
  modified_base 10: mod_base = OTHER; note = 2'-O-methyladenosine-3'-phosphate
  modified_base 12: mod_base = OTHER; note = 2'-O-methylguanosine-3'-phosphate
  modified_base 13: mod_base = OTHER; note = 2'-O-methyluridine-3'-phosphate
  modified_base 14: mod_base = OTHER; note = 2'-O-methyladenosine-3'-phosphate
  modified_base 15: mod_base = OTHER; note = 2'-O-methyladenosine-3'-phosphate
  modified_base 16: mod_base = OTHER; note = 2'-O-methylcytidine-3'-phosphate
  modified_base 17: mod_base = OTHER; note = 2'-O-methyladenosine-3'-phosphate
  modified_base 18: mod_base = OTHER; note = 2'-O-methyladenosine-3'-phosphate
  modified_base 19: mod_base = OTHER; note = 2'-O-methyladenosine-3'-phosphate
  modified_base 20: mod_base = OTHER; note = 2'-O-methylguanosine-3'-phosphate
  modified_base 21: mod_base = OTHER; note = 2'-O-methyladenosine-3'-phosphate ((2S,4R)-1-[29-[[2-(acetylamino)-2-deoxy-beta-D-galactopyra nosyl]oxy]-14,14-bis[[3-[[3-[[5-[[2-(acetylamino)-2-deoxy-b eta-D-galactopyranosyl]oxy]-1-oxopentyl]amino]propyl]amino] -3-oxopropoxy]methyl]-1,12,19,25-tetraoxo-16-oxa-13,20,24-t riazanonacos-1-yl]-4-hydroxy-2-pyrrolidinyl)methyl ester
  misc_feature 1..10: note = RNA
  misc_feature 12..21: note = RNA
  misc_feature 11: note = DNA
tgggatttcatgtaacaaaga

SEQ ID NO: 20 - RNA, 21 nt, synthetic construct
  source 1..21: mol_type = other RNA
  modified_base 1: mod_base = OTHER; note = 2'-O-methyluridine-3'-phosphorothioate
  modified_base 2: mod_base = OTHER; note = 2'-O-methylguanosine-3'-phosphorothioate
  modified_base 3: mod_base = OTHER; note = 2'-O-methylguanosine-3'-phosphate
  modified_base 4: mod_base = OTHER; note = 2'-O-methylguanosine-3'-phosphate
  modified_base 5: mod_base = OTHER; note = 2'-O-methyladenosine-3'-phosphate
  modified_base 6: mod_base = OTHER; note = 2'-O-methyluridine-3'-phosphate
  modified_base 7: mod_base = OTHER; note = 2'-deoxy-2'-fluorouridine-3'-phosphate
  modified_base 8: mod_base = OTHER; note = 2'-O-methyluridine-3'-phosphate
  modified_base 9: mod_base = OTHER; note = 2'-deoxy-2'-fluorocytidine-3'-phosphate
  modified_base 10: mod_base = OTHER; note = 2'-deoxy-2'-fluoroadenosine-3'-phosphate
  modified_base 11: mod_base = OTHER; note = 2'-deoxy-2'-fluorouridine-3'-phosphate
  modified_base 12: mod_base = OTHER; note = 2'-O-methylguanosine-3'-phosphate
  modified_base 13: mod_base = OTHER; note = 2'-O-methyluridine-3'-phosphate
  modified_base 14: mod_base = OTHER; note = 2'-O-methyladenosine-3'-phosphate
  modified_base 15: mod_base = OTHER; note = 2'-O-methyladenosine-3'-phosphate
  modified_base 16: mod_base = OTHER; note = 2'-O-methylcytidine-3'-phosphate
  modified_base 17: mod_base = OTHER; note = 2'-O-methylcytidine-3'-phosphate
  modified_base 18: mod_base = OTHER; note = 2'-O-methyladenosine-3'-phosphate
  modified_base 19: mod_base = OTHER; note = 2'-O-methyladenosine-3'-phosphate
  modified_base 20: mod_base = OTHER; note = 2'-O-methylguanosine-3'-phosphate
  modified_base 21: mod_base = OTHER; note = 2'-O-methyladenosine-3'-phosphate ((2S,4R)-1-[29-[[2-(acetylamino)-2-deoxy-beta-D-galactopyra nosyl]oxy]-14,14-bis[[3-[[3-[[5-[[2-(acetylamino)-2-deoxy-b eta-D-galactopyranosyl]oxy]-1-oxopentyl]amino]propyl]amino] -3-oxopropoxy]methyl]-1,12,19,25-tetraoxo-16-oxa-13,20,24-t riazanonacos-1-yl]-4-hydroxy-2-pyrrolidinyl)methyl ester
tgggatttcatgtaaccaaga

SEQ ID NO: 21 - RNA, 21 nt, synthetic construct
  source 1..21: mol_type = other RNA
  modified_base 1: mod_base = OTHER; note = 2'-O-methyluridine-3'-phosphorothioate
  modified_base 2: mod_base = OTHER; note = 2'-O-methylguanosine-3'-phosphorothioate
  modified_base 3: mod_base = OTHER; note = 2'-O-methylguanosine-3'-phosphate
  modified_base 4: mod_base = OTHER; note = 2'-O-methylguanosine-3'-phosphate
  modified_base 5: mod_base = OTHER; note = 2'-O-methyladenosine-3'-phosphate
  modified_base 6: mod_base = OTHER; note = 2'-O-methyluridine-3'-phosphate
  modified_base 7: mod_base = OTHER; note = 2'-deoxy-2'-fluorouridine-3'-phosphate
  modified_base 8: mod_base = OTHER; note = 2'-O-methyluridine-3'-phosphate
  modified_base 9: mod_base = OTHER; note = 2'-deoxy-2'-fluorocytidine-3'-phosphate
  modified_base 10: mod_base = OTHER; note = 2'-deoxy-2'-fluoroadenosine-3'-phosphate
  modified_base 11: mod_base = OTHER; note = 2'-deoxy-2'-fluorouridine-3'-phosphate
  modified_base 12: mod_base = OTHER; note = 2'-O-methylguanosine-3'-phosphate
  modified_base 13: mod_base = OTHER; note = 2'-O-methyluridine-3'-phosphate
  modified_base 14: mod_base = OTHER; note = 2'-O-methyladenosine-3'-phosphate
  modified_base 15: mod_base = OTHER; note = 2'-O-methyladenosine-3'-phosphate
  modified_base 16: mod_base = OTHER; note = 2'-O-methylcytidine-3'-phosphate
  modified_base 17: mod_base = OTHER; note = 2'-O-methylcytidine-3'-phosphate
  modified_base 18: mod_base = OTHER; note = 2'-O-methyladenosine-3'-phosphate
  modified_base 19: mod_base = OTHER; note = 2'-O-methyladenosine-3'-phosphate
  modified_base 20: mod_base = OTHER; note = 2'-O-methylguanosine-3'-phosphate
  modified_base 21: mod_base = OTHER; note = 2'-O-methyladenosine-3'-phosphate ((2S,4R)-1-[29-[[2-(acetylamino)-2-deoxy-beta-D-galactopyra nosyl]oxy]-14,14-bis[[3-[[3-[[5-[[2-(acetylamino)-2-deoxy-b eta-D-galactopyranosyl]oxy]-1-oxopentyl]amino]propyl]amino] -3-oxopropoxy]methyl]-1,12,19,25-tetraoxo-16-oxa-13,20,24-t riazanonacos-1-yl]-4-hydroxy-2-pyrrolidinyl)methyl ester
tgggatttcatgtaaccaaga

SEQ ID NO: 22 - RNA, 21 nt, synthetic construct
  source 1..21: mol_type = other RNA
  modified_base 1: mod_base = OTHER; note = 2'-O-methyluridine-3'-phosphorothioate
  modified_base 2: mod_base = OTHER; note = 2'-O-methylguanosine-3'-phosphorothioate
  modified_base 3: mod_base = OTHER; note = 2'-O-methylguanosine-3'-phosphate
  modified_base 4: mod_base = OTHER; note = 2'-O-methylguanosine-3'-phosphate
  modified_base 5: mod_base = OTHER; note = 2'-O-methyladenosine-3'-phosphate
  modified_base 6: mod_base = OTHER; note = 2'-O-methyluridine-3'-phosphate
  modified_base 7: mod_base = OTHER; note = 2'-deoxy-2'-fluorouridine-3'-phosphate
  modified_base 8: mod_base = OTHER; note = 2'-O-methyluridine-3'-phosphate
  modified_base 9: mod_base = OTHER; note = 2'-deoxy-2'-fluorocytidine-3'-phosphate
  modified_base 10: mod_base = OTHER; note = 2'-deoxy-2'-fluoroadenosine-3'-phosphate
  modified_base 11: mod_base = OTHER; note = 2'-deoxy-2'-fluorouridine-3'-phosphate
  modified_base 12: mod_base = OTHER; note = 2'-O-methylguanosine-3'-phosphate
  modified_base 13: mod_base = OTHER; note = 2'-O-methyluridine-3'-phosphate
  modified_base 14: mod_base = OTHER; note = 2'-O-methyladenosine-3'-phosphate
  modified_base 15: mod_base = OTHER; note = 2'-O-methyladenosine-3'-phosphate
  modified_base 16: mod_base = OTHER; note = 2'-O-methylcytidine-3'-phosphate
  modified_base 17: mod_base = OTHER; note = 2'-O-methylcytidine-3'-phosphate
  modified_base 18: mod_base = OTHER; note = 2'-O-methyladenosine-3'-phosphate
  modified_base 19: mod_base = OTHER; note = 2'-O-methyladenosine-3'-phosphate
  modified_base 20: mod_base = OTHER; note = 2'-O-methylguanosine-3'-phosphate
  modified_base 21: mod_base = OTHER; note = 2'-O-methyladenosine-3'-phosphate ((2S,4R)-1-[29-[[2-(acetylamino)-2-deoxy-beta-D-galactopyra nosyl]oxy]-14,14-bis[[3-[[3-[[5-[[2-(acetylamino)-2-deoxy-b eta-D-galactopyranosyl]oxy]-1-oxopentyl]amino]propyl]amino] -3-oxopropoxy]methyl]-1,12,19,25-tetraoxo-16-oxa-13,20,24-t riazanonacos-1-yl]-4-hydroxy-2-pyrrolidinyl)methyl ester
tgggatttcatgtaaccaaga

SEQ ID NO: 23 - DNA, 21 bp, synthetic construct
  source 1..21: mol_type = other DNA
  modified_base 1: mod_base = OTHER; note = 2'-O-methyluridine-3'-phosphorothioate
  modified_base 2: mod_base = OTHER; note = 2'-O-methylguanosine-3'-phosphorothioate
  modified_base 3: mod_base = OTHER; note = 2'-O-methylguanosine-3'-phosphate
  modified_base 4: mod_base = OTHER; note = 2'-O-methylguanosine-3'-phosphate
  modified_base 5: mod_base = OTHER; note = 2'-O-methyladenosine-3'-phosphate
  modified_base 6: mod_base = OTHER; note = 2'-O-methyluridine-3'-phosphate
  modified_base 7: mod_base = OTHER; note = 2'-O-methyluridine-3'-phosphate
  modified_base 8: mod_base = OTHER; note = 2'-O-methyluridine-3'-phosphate
  modified_base 9: mod_base = OTHER; note = 2'-O-methylcytidine-3'-phosphate
  modified_base 10: mod_base = OTHER; note = 2'-O-methyladenosine-3'-phosphate
  modified_base 12: mod_base = OTHER; note = 2'-O-methylguanosine-3'-phosphate
  modified_base 13: mod_base = OTHER; note = 2'-O-methyluridine-3'-phosphate
  modified_base 14: mod_base = OTHER; note = 2'-O-methyladenosine-3'-phosphate
  modified_base 15: mod_base = OTHER; note = 2'-O-methyladenosine-3'-phosphate
  modified_base 16: mod_base = OTHER; note = 2'-O-methylcytidine-3'-phosphate
  modified_base 17: mod_base = OTHER; note = 2-hydroxymethyl-4-methoxy-tetrahydrofuran-3-phosphate
  modified_base 18: mod_base = OTHER; note = 2'-O-methyladenosine-3'-phosphate
  modified_base 19: mod_base = OTHER; note = 2'-O-methyladenosine-3'-phosphate
  modified_base 20: mod_base = OTHER; note = 2'-O-methylguanosine-3'-phosphate
  modified_base 21: mod_base = OTHER; note = 2'-O-methyladenosine-3'-phosphate ((2S,4R)-1-[29-[[2-(acetylamino)-2-deoxy-beta-D-galactopyra nosyl]oxy]-14,14-bis[[3-[[3-[[5-[[2-(acetylamino)-2-deoxy-b eta-D-galactopyranosyl]oxy]-1-oxopentyl]amino]propyl]amino] -3-oxopropoxy]methyl]-1,12,19,25-tetraoxo-16-oxa-13,20,24-t riazanonacos-1-yl]-4-hydroxy-2-pyrrolidinyl)methyl ester
  misc_feature 1..10: note = RNA
  misc_feature 12..21: note = RNA
  misc_feature 11: note = DNA
tgggatttcatgtaacnaaga

SEQ ID NO: 24 - RNA, 21 nt, synthetic construct
  source 1..21: mol_type = other RNA
  modified_base 1: mod_base = OTHER; note = 2'-O-methyluridine-3'-phosphorothioate
  modified_base 2: mod_base = OTHER; note = 2'-O-methylguanosine-3'-phosphorothioate
  modified_base 3: mod_base = OTHER; note = 2'-O-methylguanosine-3'-phosphate
  modified_base 4: mod_base = OTHER; note = 2'-O-methylguanosine-3'-phosphate
  modified_base 5: mod_base = OTHER; note = 2'-O-methyladenosine-3'-phosphate
  modified_base 6: mod_base = OTHER; note = 2'-O-methyluridine-3'-phosphate
  modified_base 7: mod_base = OTHER; note = 2'-deoxy-2'-fluorouridine-3'-phosphate
  modified_base 8: mod_base = OTHER; note = 2'-O-methyluridine-3'-phosphate
  modified_base 9: mod_base = OTHER; note = 2'-deoxy-2'-fluorocytidine-3'-phosphate
  modified_base 10: mod_base = OTHER; note = 2'-deoxy-2'-fluoroadenosine-3'-phosphate
  modified_base 11: mod_base = OTHER; note = 2'-deoxy-2'-fluorouridine-3'-phosphate
  modified_base 12: mod_base = OTHER; note = 2'-O-methylguanosine-3'-phosphate
  modified_base 13: mod_base = OTHER; note = 2'-O-methyluridine-3'-phosphate
  modified_base 14: mod_base = OTHER; note = 2'-O-methyladenosine-3'-phosphate
  modified_base 15: mod_base = OTHER; note = 2'-O-methyladenosine-3'-phosphate
  modified_base 16: mod_base = OTHER; note = 2'-deoxy-2'-fluorocytidine-3'-phosphate
  modified_base 17: mod_base = OTHER; note = 2'-O-methylcytidine-3'-phosphate
  modified_base 18: mod_base = OTHER; note = 2'-O-methyladenosine-3'-phosphate
  modified_base 19: mod_base = OTHER; note = 2'-O-methyladenosine-3'-phosphate
  modified_base 20: mod_base = OTHER; note = 2'-O-methylguanosine-3'-phosphate
  modified_base 21: mod_base = OTHER; note = 2'-O-methyladenosine-3'-phosphate ((2S,4R)-1-[29-[[2-(acetylamino)-2-deoxy-beta-D-galactopyra nosyl]oxy]-14,14-bis[[3-[[3-[[5-[[2-(acetylamino)-2-deoxy-b eta-D-galactopyranosyl]oxy]-1-oxopentyl]amino]propyl]amino] -3-oxopropoxy]methyl]-1,12,19,25-tetraoxo-16-oxa-13,20,24-t riazanonacos-1-yl]-4-hydroxy-2-pyrrolidinyl)methyl ester
tgggatttcatgtaaccaaga

SEQ ID NO: 25 - RNA, 21 nt, synthetic construct
  source 1..21: mol_type = other RNA
  modified_base 1: mod_base = OTHER; note = 2'-O-methyluridine-3'-phosphorothioate
  modified_base 2: mod_base = OTHER; note = 2'-O-methylguanosine-3'-phosphorothioate
  modified_base 3: mod_base = OTHER; note = 2'-O-methylguanosine-3'-phosphate
  modified_base 4: mod_base = OTHER; note = 2'-O-methylguanosine-3'-phosphate
  modified_base 5: mod_base = OTHER; note = 2'-deoxy-2'-fluoroadenosine-3'-phosphate
  modified_base 6: mod_base = OTHER; note = 2'-O-methyluridine-3'-phosphate
  modified_base 7: mod_base = OTHER; note = 2'-deoxy-2'-fluorouridine-3'-phosphate
  modified_base 8: mod_base = OTHER; note = 2'-O-methyluridine-3'-phosphate
  modified_base 9: mod_base = OTHER; note = 2'-deoxy-2'-fluorocytidine-3'-phosphate
  modified_base 10: mod_base = OTHER; note = 2'-deoxy-2'-fluoroadenosine-3'-phosphate
  modified_base 11: mod_base = OTHER; note = 2'-deoxy-2'-fluorouridine-3'-phosphate
  modified_base 12: mod_base = OTHER; note = 2'-O-methylguanosine-3'-phosphate
  modified_base 13: mod_base = OTHER; note = 2'-deoxy-2'-fluorouridine-3'-phosphate
  modified_base 14: mod_base = OTHER; note = 2'-O-methyladenosine-3'-phosphate
  modified_base 15: mod_base = OTHER; note = 2'-O-methyladenosine-3'-phosphate
  modified_base 16: mod_base = OTHER; note = 2'-O-methylcytidine-3'-phosphate
  modified_base 17: mod_base = OTHER; note = 2'-O-methylcytidine-3'-phosphate
  modified_base 18: mod_base = OTHER; note = 2'-O-methyladenosine-3'-phosphate
  modified_base 19: mod_base = OTHER; note = 2'-O-methyladenosine-3'-phosphate
  modified_base 20: mod_base = OTHER; note = 2'-O-methylguanosine-3'-phosphate
  modified_base 21: mod_base = OTHER; note = 2'-deoxy-2'-fluoroadenosine-3'-phosphate ((2S,4R)-1-[29-[[2-(acetylamino)-2-deoxy-beta-D-galactopyra nosyl]oxy]-14,14-bis[[3-[[3-[[5-[[2-(acetylamino)-2-deoxy-b eta-D-galactopyranosyl]oxy]-1-oxopentyl]amino]propyl]amino] -3-oxopropoxy]methyl]-1,12,19,25-tetraoxo-16-oxa-13,20,24-t riazanonacos-1-yl]-4-hydroxy-2-pyrrolidinyl)methyl ester
tgggatttcatgtaaccaaga

SEQ ID NO: 26 - DNA, 21 bp, synthetic construct
  source 1..21: mol_type = other DNA
  modified_base 1: mod_base = OTHER; note = 2'-O-methyluridine-3'-phosphorothioate
  modified_base 2: mod_base = OTHER; note = 2'-O-methylguanosine-3'-phosphorothioate
  modified_base 3: mod_base = OTHER; note = 2'-O-methylguanosine-3'-phosphate
  modified_base 4: mod_base = OTHER; note = 2'-O-methylguanosine-3'-phosphate
  modified_base 5: mod_base = OTHER; note = 2'-O-methyladenosine-3'-phosphate
  modified_base 6: mod_base = OTHER; note = 2'-O-methyluridine-3'-phosphate
  modified_base 7: mod_base = OTHER; note = 2'-O-methyluridine-3'-phosphate
  modified_base 8: mod_base = OTHER; note = 2'-O-methyluridine-3'-phosphate
  modified_base 9: mod_base = OTHER; note = 2'-O-methylcytidine-3'-phosphate
  modified_base 10: mod_base = OTHER; note = 2'-O-methyladenosine-3'-phosphate
  modified_base 12: mod_base = OTHER; note = 2'-O-methylguanosine-3'-phosphate
  modified_base 13: mod_base = OTHER; note = 2'-O-methyluridine-3'-phosphate
  modified_base 14: mod_base = OTHER; note = 2'-O-methyladenosine-3'-phosphate
  modified_base 15: mod_base = OTHER; note = 2'-O-methyladenosine-3'-phosphate
  modified_base 16: mod_base = OTHER; note = 2'-O-methylcytidine-3'-phosphate
  modified_base 17: mod_base = OTHER; note = 2'-O-methyladenosine-3'-phosphate
  modified_base 18: mod_base = OTHER; note = 2'-O-methyladenosine-3'-phosphate
  modified_base 19: mod_base = OTHER; note = 2'-O-methyladenosine-3'-phosphate
  modified_base 20: mod_base = OTHER; note = 2'-O-methylguanosine-3'-phosphate
  modified_base 21: mod_base = OTHER; note = 2'-O-methyladenosine-3'-phosphate ((2S,4R)-1-[29-[[2-(acetylamino)-2-deoxy-beta-D-galactopyra nosyl]oxy]-14,14-bis[[3-[[3-[[5-[[2-(acetylamino)-2-deoxy-b eta-D-galactopyranosyl]oxy]-1-oxopentyl]amino]propyl]amino] -3-oxopropoxy]methyl]-1,12,19,25-tetraoxo-16-oxa-13,20,24-t riazanonacos-1-yl]-4-hydroxy-2-pyrrolidinyl)methyl ester
  misc_feature 1..10: note = RNA
  misc_feature 12..21: note = RNA
  misc_feature 11: note = DNA
tgggatttcatgtaacaaaga

SEQ ID NO: 27 - DNA, 21 bp, synthetic construct
  source 1..21: mol_type = other DNA
  modified_base 1: mod_base = OTHER; note = 2'-O-methyluridine-3'-phosphorothioate
  modified_base 2: mod_base = OTHER; note = 2'-O-methylguanosine-3'-phosphorothioate
  modified_base 3: mod_base = OTHER; note = 2'-O-methylguanosine-3'-phosphate
  modified_base 4: mod_base = OTHER; note = 2'-O-methylguanosine-3'-phosphate
  modified_base 5: mod_base = OTHER; note = 2'-O-methyladenosine-3'-phosphate
  modified_base 6: mod_base = OTHER; note = 2'-O-methyluridine-3'-phosphate
  modified_base 7: mod_base = OTHER; note = 2'-O-methyluridine-3'-phosphate
  modified_base 8: mod_base = OTHER; note = 2'-O-methyluridine-3'-phosphate
  modified_base 9: mod_base = OTHER; note = 2'-O-methylcytidine-3'-phosphate
  modified_base 10: mod_base = OTHER; note = 2'-O-methyladenosine-3'-phosphate
  modified_base 12: mod_base = OTHER; note = 2'-O-methylguanosine-3'-phosphate
  modified_base 13: mod_base = OTHER; note = 2'-O-methyluridine-3'-phosphate
  modified_base 14: mod_base = OTHER; note = 2'-O-methyladenosine-3'-phosphate
  modified_base 15: mod_base = OTHER; note = 2'-O-methyladenosine-3'-phosphate
  modified_base 16: mod_base = OTHER; note = 2'-O-methylcytidine-3'-phosphate
  modified_base 17: mod_base = OTHER; note = 2'-O-methyladenosine-3'-phosphate
  modified_base 18: mod_base = OTHER; note = 2'-O-methyladenosine-3'-phosphate
  modified_base 19: mod_base = OTHER; note = 2'-O-methyladenosine-3'-phosphate
  modified_base 20: mod_base = OTHER; note = 2'-O-methylguanosine-3'-phosphate
  modified_base 21: mod_base = OTHER; note = 2'-O-methyladenosine-3'-phosphate ((2S,4R)-1-[29-[[2-(acetylamino)-2-deoxy-beta-D-galactopyra nosyl]oxy]-14,14-bis[[3-[[3-[[5-[[2-(acetylamino)-2-deoxy-b eta-D-galactopyranosyl]oxy]-1-oxopentyl]amino]propyl]amino] -3-oxopropoxy]methyl]-1,12,19,25-tetraoxo-16-oxa-13,20,24-t riazanonacos-1-yl]-4-hydroxy-2-pyrrolidinyl)methyl ester
  misc_feature 1..10: note = RNA
  misc_feature 12..21: note = RNA
  misc_feature 11: note = DNA
tgggatttcatgtaacaaaga

SEQ ID NO: 28 - DNA, 21 bp, synthetic construct
  source 1..21: mol_type = other DNA
  modified_base 1: mod_base = OTHER; note = 2'-O-methyluridine-3'-phosphorothioate
  modified_base 2: mod_base = OTHER; note = 2'-O-methylguanosine-3'-phosphorothioate
  modified_base 3: mod_base = OTHER; note = 2'-O-methylguanosine-3'-phosphate
  modified_base 4: mod_base = OTHER; note = 2'-O-methylguanosine-3'-phosphate
  modified_base 5: mod_base = OTHER; note = 2'-O-methyladenosine-3'-phosphate
  modified_base 6: mod_base = OTHER; note = 2'-O-methyluridine-3'-phosphate
  modified_base 7: mod_base = OTHER; note = 2'-O-methyluridine-3'-phosphate
  modified_base 8: mod_base = OTHER; note = 2'-O-methyluridine-3'-phosphate
  modified_base 9: mod_base = OTHER; note = 2'-O-methylcytidine-3'-phosphate
  modified_base 10: mod_base = OTHER; note = 2'-O-methyladenosine-3'-phosphate
  modified_base 12: mod_base = OTHER; note = 2'-O-methylguanosine-3'-phosphate
  modified_base 13: mod_base = OTHER; note = 2'-O-methyluridine-3'-phosphate
  modified_base 14: mod_base = OTHER; note = 2'-O-methyladenosine-3'-phosphate
  modified_base 15: mod_base = OTHER; note = 2'-O-methyladenosine-3'-phosphate
  modified_base 16: mod_base = OTHER; note = 2'-O-methylcytidine-3'-phosphate
  modified_base 17: mod_base = OTHER; note = 2'-O-methyladenosine-3'-phosphate
  modified_base 18: mod_base = OTHER; note = 2'-O-methyladenosine-3'-phosphate
  modified_base 19: mod_base = OTHER; note = 2'-O-methyladenosine-3'-phosphate
  modified_base 20: mod_base = OTHER; note = 2'-O-methylguanosine-3'-phosphate
  modified_base 21: mod_base = OTHER; note = 2'-O-methyladenosine-3'-phosphate ((2S,4R)-1-[29-[[2-(acetylamino)-2-deoxy-beta-D-galactopyra nosyl]oxy]-14,14-bis[[3-[[3-[[5-[[2-(acetylamino)-2-deoxy-b eta-D-galactopyranosyl]oxy]-1-oxopentyl]amino]propyl]amino] -3-oxopropoxy]methyl]-1,12,19,25-tetraoxo-16-oxa-13,20,24-t riazanonacos-1-yl]-4-hydroxy-2-pyrrolidinyl)methyl ester
  misc_feature 1..10: note = RNA
  misc_feature 12..21: note = RNA
  misc_feature 11: note = DNA
tgggatttcatgtaacaaaga

SEQ ID NO: 29 - RNA, 23 nt, synthetic construct
  source 1..23: mol_type = other RNA
  modified_base 1: mod_base = OTHER; note = 2'-O-methyluridine-3'-phosphate
  modified_base 2: mod_base = OTHER; note = 2'-deoxy-2'-fluorocytidine-3'-phosphate
  modified_base 3: mod_base = OTHER; note = 2'-O-methyluridine-3'-phosphate
  modified_base 4: mod_base = OTHER; note = 2'-deoxy-2'-fluorouridine-3'-phosphate
  modified_base 5: mod_base = OTHER; note = 2'-O-methylguanosine-3'-phosphate
  modified_base 6: mod_base = OTHER; note = 2'-deoxy-2'-fluoroguanosine-3'-phosphate
  modified_base 7: mod_base = OTHER; note = 2'-deoxy-2'-fluorouridine-3'-phosphate
  modified_base 8: mod_base = OTHER; note = 2'-deoxy-2'-fluorouridine-3'-phosphate
  modified_base 9: mod_base = OTHER; note = 2'-O-methyladenosine-3'-phosphate
  modified_base 10: mod_base = OTHER; note = 2'-deoxy-2'-fluorocytidine-3'-phosphate
  modified_base 11: mod_base = OTHER; note = 2'-O-methyladenosine-3'-phosphate
  modified_base 12: mod_base = OTHER; note = 2'-O-methyluridine-3'-phosphate
  modified_base 13: mod_base = OTHER; note = 2'-O-methylguanosine-3'-phosphate
  modified_base 14: mod_base = OTHER; note = 2'-deoxy-2'-fluoroadenosine-3'-phosphate
  modified_base 15: mod_base = OTHER; note = 2'-O-methyladenosine-3'-phosphate
  modified_base 16: mod_base = OTHER; note = 2'-deoxy-2'-fluoroadenosine-3'-phosphate
  modified_base 17: mod_base = OTHER; note = 2'-O-methyluridine-3'-phosphate
  modified_base 18: mod_base = OTHER; note = 2'-deoxy-2'-fluorocytidine-3'-phosphate
  modified_base 19: mod_base = OTHER; note = 2'-O-methylcytidine-3'-phosphate
  modified_base 20: mod_base = OTHER; note = 2'-deoxy-2'-fluorocytidine-3'-phosphate
  modified_base 21: mod_base = OTHER; note = 2'-O-methyladenosine-3'-phosphorothioate
  modified_base 22: mod_base = OTHER; note = 2'-deoxy-2'-fluorouridine-3'-phosphorothioate
  modified_base 23: mod_base = OTHER; note = 2'-O-methylcytidine
tcttggttacatgaaatcccatc

SEQ ID NO: 30 - RNA, 23 nt, synthetic construct
  source 1..23: mol_type = other RNA
  modified_base 1: mod_base = OTHER; note = 2'-O-methyluridine-3'-phosphorothioate
  modified_base 2: mod_base = OTHER; note = 2'-deoxy-2'-fluorocytidine-3'-phosphorothioate
  modified_base 3: mod_base = OTHER; note = 2'-O-methyluridine-3'-phosphate
  modified_base 4: mod_base = OTHER; note = 2'-deoxy-2'-fluorouridine-3'-phosphate
  modified_base 5: mod_base = OTHER; note = 2'-O-methylguanosine-3'-phosphate
  modified_base 6: mod_base = OTHER; note = 2'-deoxy-2'-fluoroguanosine-3'-phosphate
  modified_base 7: mod_base = OTHER; note = 2'-deoxy-2'-fluorouridine-3'-phosphate
  modified_base 8: mod_base = OTHER; note = 2'-deoxy-2'-fluorouridine-3'-phosphate
  modified_base 9: mod_base = OTHER; note = 2'-O-methyladenosine-3'-phosphate
  modified_base 10: mod_base = OTHER; note = 2'-deoxy-2'-fluorocytidine-3'-phosphate
  modified_base 11: mod_base = OTHER; note = 2'-O-methyladenosine-3'-phosphate
  modified_base 12: mod_base = OTHER; note = 2'-O-methyluridine-3'-phosphate
  modified_base 13: mod_base = OTHER; note = 2'-O-methylguanosine-3'-phosphate
  modified_base 14: mod_base = OTHER; note = 2'-deoxy-2'-fluoroadenosine-3'-phosphate
  modified_base 15: mod_base = OTHER; note = 2'-O-methyladenosine-3'-phosphate
  modified_base 16: mod_base = OTHER; note = 2'-deoxy-2'-fluoroadenosine-3'-phosphate
  modified_base 17: mod_base = OTHER; note = 2'-O-methyluridine-3'-phosphate
  modified_base 18: mod_base = OTHER; note = 2'-deoxy-2'-fluorocytidine-3'-phosphate
  modified_base 19: mod_base = OTHER; note = 2'-O-methylcytidine-3'-phosphate
  modified_base 20: mod_base = OTHER; note = 2'-deoxy-2'-fluorocytidine-3'-phosphate
  modified_base 21: mod_base = OTHER; note = 2'-O-methyladenosine-3'-phosphorothioate
  modified_base 22: mod_base = OTHER; note = 2'-O-methyluridine-3'-phosphorothioate
  modified_base 23: mod_base = OTHER; note = 2'-O-methylcytidine
tcttggttacatgaaatcccatc

SEQ ID NO: 31 - DNA, 23 bp, synthetic construct
  source 1..23: mol_type = other DNA
  modified_base 1: mod_base = OTHER; note = 2'-O-methyluridine-3'-phosphorothioate
  modified_base 2: mod_base = OTHER; note = 2'-deoxycytidine-3'-phosphorothioate
  modified_base 3: mod_base = OTHER; note = 2'-O-methyluridine-3'-phosphate
  modified_base 4: mod_base = OTHER; note = 2'-O-methyluridine-3'-phosphate
  modified_base 5: mod_base = OTHER; note = 2'-O-methylguanosine-3'-phosphate
  modified_base 6: mod_base = OTHER; note = 2'-O-methylguanosine-3'-phosphate
  modified_base 7: mod_base = OTHER; note = 2'-O-methyluridine-3'-phosphate
  modified_base 8: mod_base = OTHER; note = 2'-O-methyluridine-3'-phosphate
  modified_base 9: mod_base = OTHER; note = 2'-O-methyladenosine-3'-phosphate
  modified_base 11: mod_base = OTHER; note = 2'-O-methyladenosine-3'-phosphate
  modified_base 12: mod_base = OTHER; note = 2'-O-methyluridine-3'-phosphate
  modified_base 13: mod_base = OTHER; note = 2'-O-methylguanosine-3'-phosphate
  modified_base 15: mod_base = OTHER; note = 2'-O-methyladenosine-3'-phosphate
  modified_base 16: mod_base = OTHER; note = 2'-O-methyladenosine-3'-phosphate
  modified_base 17: mod_base = OTHER; note = 2'-O-methyluridine-3'-phosphate
  modified_base 18: mod_base = OTHER; note = 2'-O-methylcytidine-3'-phosphate
  modified_base 19: mod_base = OTHER; note = 2'-O-methylcytidine-3'-phosphate
  modified_base 20: mod_base = OTHER; note = 2'-O-methylcytidine-3'-phosphate
  modified_base 21: mod_base = OTHER; note = 2'-O-methyladenosine-3'-phosphorothioate
  modified_base 22: mod_base = OTHER; note = 2'-O-methyluridine-3'-phosphorothioate
  modified_base 23: mod_base = OTHER; note = 2'-O-methylcytidine
  misc_feature 1: note = RNA
  misc_feature 3..9: note = RNA
  misc_feature 11..13: note = RNA
  misc_feature 15..23: note = RNA
  misc_feature 2: note = DNA
  misc_feature 10: note = DNA
  misc_feature 14: note = DNA
tcttggttacatgaaatcccatc

SEQ ID NO: 32 - RNA, 23 nt, synthetic construct
  source 1..23: mol_type = other RNA
  modified_base 1: mod_base = OTHER; note = 2'-O-methyluridine-3'-phosphorothioate
  modified_base 2: mod_base = OTHER; note = 2'-deoxy-2'-fluorocytidine-3'-phosphorothioate
  modified_base 3: mod_base = OTHER; note = 2'-O-methyluridine-3'-phosphate
  modified_base 4: mod_base = OTHER; note = 2'-O-methyluridine-3'-phosphate
  modified_base 5: mod_base = OTHER; note = 2'-O-methylguanosine-3'-phosphate
  modified_base 6: mod_base = OTHER; note = 2'-O-methylguanosine-3'-phosphate
  modified_base 7: mod_base = OTHER; note = 2'-O-methyluridine-3'-phosphate
  modified_base 8: mod_base = OTHER; note = 2'-O-methyluridine-3'-phosphate
  modified_base 9: mod_base = OTHER; note = 2'-O-methyladenosine-3'-phosphate
  modified_base 10: mod_base = OTHER; note = 2'-O-methylcytidine-3'-phosphate
  modified_base 11: mod_base = OTHER; note = 2'-O-methyladenosine-3'-phosphate
  modified_base 12: mod_base = OTHER; note = 2'-O-methyluridine-3'-phosphate
  modified_base 13: mod_base = OTHER; note = 2'-O-methylguanosine-3'-phosphate
  modified_base 14: mod_base = OTHER; note = 2'-deoxy-2'-fluoroadenosine-3'-phosphate
  modified_base 15: mod_base = OTHER; note = 2'-O-methyladenosine-3'-phosphate
  modified_base 16: mod_base = OTHER; note = 2'-O-methyladenosine-3'-phosphate
  modified_base 17: mod_base = OTHER; note = 2'-O-methyluridine-3'-phosphate
  modified_base 18: mod_base = OTHER; note = 2'-O-methylcytidine-3'-phosphate
  modified_base 19: mod_base = OTHER; note = 2'-O-methylcytidine-3'-phosphate
  modified_base 20: mod_base = OTHER; note = 2'-O-methylcytidine-3'-phosphate
  modified_base 21: mod_base = OTHER; note = 2'-O-methyladenosine-3'-phosphorothioate
  modified_base 22: mod_base = OTHER; note = 2'-O-methyluridine-3'-phosphorothioate
  modified_base 23: mod_base = OTHER; note = 2'-O-methylcytidine
tcttggttacatgaaatcccatc

SEQ ID NO: 33 - RNA, 23 nt, synthetic construct
  source 1..23: mol_type = other RNA
  modified_base 1: mod_base = OTHER; note = 2'-O-methyluridine-3'-phosphorothioate
  modified_base 2: mod_base = OTHER; note = 2'-deoxy-2'-fluorocytidine-3'-phosphorothioate
  modified_base 3: mod_base = OTHER; note = 2'-O-methyluridine-3'-phosphate
  modified_base 4: mod_base = OTHER; note = 2'-O-methyluridine-3'-phosphate
  modified_base 5: mod_base = OTHER; note = 2'-O-methylguanosine-3'-phosphate
  modified_base 6: mod_base = OTHER; note = 2'-O-methylguanosine-3'-phosphate
  modified_base 7: mod_base = OTHER; note = 2'-O-methyluridine-3'-phosphate
  modified_base 8: mod_base = OTHER; note = 2'-O-methyluridine-3'-phosphate
  modified_base 9: mod_base = OTHER; note = 2'-O-methyladenosine-3'-phosphate
  modified_base 10: mod_base = OTHER; note = 2'-O-methylcytidine-3'-phosphate
  modified_base 11: mod_base = OTHER; note = 2'-O-methyladenosine-3'-phosphate
  modified_base 12: mod_base = OTHER; note = 2'-O-methyluridine-3'-phosphate
  modified_base 13: mod_base = OTHER; note = 2'-O-methylguanosine-3'-phosphate
  modified_base 14: mod_base = OTHER; note = 2'-deoxy-2'-fluoroadenosine-3'-phosphate
  modified_base 15: mod_base = OTHER; note = 2'-O-methyladenosine-3'-phosphate
  modified_base 16: mod_base = OTHER; note = 2'-O-methyladenosine-3'-phosphate
  modified_base 17: mod_base = OTHER; note = 2'-O-methyluridine-3'-phosphate
  modified_base 18: mod_base = OTHER; note = 2'-O-methylcytidine-3'-phosphate
  modified_base 19: mod_base = OTHER; note = 2'-O-methylcytidine-3'-phosphate
  modified_base 20: mod_base = OTHER; note = 2'-O-methylcytidine-3'-phosphate
  modified_base 21: mod_base = OTHER; note = 2'-O-methyladenosine-3'-phosphorothioate
  modified_base 22: mod_base = OTHER; note = 2'-O-methyluridine-3'-phosphorothioate
  modified_base 23: mod_base = OTHER; note = 2'-O-methylcytidine
tcttggttacatgaaatcccatc

SEQ ID NO: 34 - RNA, 23 nt, synthetic construct
  source 1..23: mol_type = other RNA
  modified_base 1: mod_base = OTHER; note = 2'-deoxy-2'-fluorouridine-3'-phosphorothioate
  modified_base 2: mod_base = OTHER; note = 2'-deoxy-2'-fluorocytidine-3'-phosphorothioate
  modified_base 3: mod_base = OTHER; note = 2'-O-methyluridine-3'-phosphate
  modified_base 4: mod_base = OTHER; note = 2'-O-methyluridine-3'-phosphate
  modified_base 5: mod_base = OTHER; note = 2'-O-methylguanosine-3'-phosphate
  modified_base 6: mod_base = OTHER; note = 2'-deoxy-2'-fluoroguanosine-3'-phosphate
  modified_base 7: mod_base = OTHER; note = 2'-O-methyluridine-3'-phosphate
  modified_base 8: mod_base = OTHER; note = 2'-O-methyluridine-3'-phosphate
  modified_base 9: mod_base = OTHER; note = 2'-O-methyladenosine-3'-phosphate
  modified_base 10: mod_base = OTHER; note = 2'-O-methylcytidine-3'-phosphate
  modified_base 11: mod_base = OTHER; note = 2'-O-methyladenosine-3'-phosphate
  modified_base 12: mod_base = OTHER; note = 2'-O-methyluridine-3'-phosphate
  modified_base 13: mod_base = OTHER; note = 2'-O-methylguanosine-3'-phosphate
  modified_base 14: mod_base = OTHER; note = 2'-deoxy-2'-fluoroadenosine-3'-phosphate
  modified_base 15: mod_base = OTHER; note = 2'-O-methyladenosine-3'-phosphate
  modified_base 16: mod_base = OTHER; note = 2'-deoxy-2'-fluoroadenosine-3'-phosphate
  modified_base 17: mod_base = OTHER; note = 2'-O-methyluridine-3'-phosphate
  modified_base 18: mod_base = OTHER; note = 2'-O-methylcytidine-3'-phosphate
  modified_base 19: mod_base = OTHER; note = 2'-O-methylcytidine-3'-phosphate
  modified_base 20: mod_base = OTHER; note = 2'-O-methylcytidine-3'-phosphate
  modified_base 21: mod_base = OTHER; note = 2'-O-methyladenosine-3'-phosphorothioate
  modified_base 22: mod_base = OTHER; note = 2'-O-methyluridine-3'-phosphorothioate
  modified_base 23: mod_base = OTHER; note = 2'-O-methylcytidine
tcttggttacatgaaatcccatc

SEQ ID NO: 35 - RNA, 23 nt, synthetic construct
  source 1..23: mol_type = other RNA
  modified_base 1: mod_base = OTHER; note = 2'-O-methyluridine-3'-phosphorothioate 5'phosphate
  modified_base 2: mod_base = OTHER; note = 2'-deoxy-2'-fluorocytidine-3'-phosphorothioate
  modified_base 3: mod_base = OTHER; note = 2'-O-methyluridine-3'-phosphate
  modified_base 4: mod_base = OTHER; note = 2'-O-methyluridine-3'-phosphate
  modified_base 5: mod_base = OTHER; note = 2'-O-methylguanosine-3'-phosphate
  modified_base 6: mod_base = OTHER; note = 2'-deoxy-2'-fluoroguanosine-3'-phosphate
  modified_base 7: mod_base = OTHER; note = 2'-O-methyluridine-3'-phosphate
  modified_base 8: mod_base = OTHER; note = 2'-O-methyluridine-3'-phosphate
  modified_base 9: mod_base = OTHER; note = 2'-O-methyladenosine-3'-phosphate
  modified_base 10: mod_base = OTHER; note = 2'-O-methylcytidine-3'-phosphate
  modified_base 11: mod_base = OTHER; note = 2'-O-methyladenosine-3'-phosphate
  modified_base 12: mod_base = OTHER; note = 2'-O-methyluridine-3'-phosphate
  modified_base 13: mod_base = OTHER; note = 2'-O-methylguanosine-3'-phosphate
  modified_base 14: mod_base = OTHER; note = 2'-deoxy-2'-fluoroadenosine-3'-phosphate
  modified_base 15: mod_base = OTHER; note = 2'-O-methyladenosine-3'-phosphate
  modified_base 16: mod_base = OTHER; note = 2'-deoxy-2'-fluoroadenosine-3'-phosphate
  modified_base 17: mod_base = OTHER; note = 2'-O-methyluridine-3'-phosphate
  modified_base 18: mod_base = OTHER; note = 2'-O-methylcytidine-3'-phosphate
  modified_base 19: mod_base = OTHER; note = 2'-O-methylcytidine-3'-phosphate
  modified_base 20: mod_base = OTHER; note = 2'-O-methylcytidine-3'-phosphate
  modified_base 21: mod_base = OTHER; note = 2'-O-methyladenosine-3'-phosphorothioate
  modified_base 22: mod_base = OTHER; note = 2'-O-methyluridine-3'-phosphorothioate
  modified_base 23: mod_base = OTHER; note = 2'-O-methylcytidine
tcttggttacatgaaatcccatc

SEQ ID NO: 36 - RNA, 23 nt, synthetic construct
  source 1..23: mol_type = other RNA
  modified_base 1: mod_base = OTHER; note = 2'-O-methyluridine-3'-phosphorothioate 5'phosphate
  modified_base 2: mod_base = OTHER; note = 2'-deoxy-2'-fluorocytidine-3'-phosphorothioate
  modified_base 3: mod_base = OTHER; note = 2'-O-methyluridine-3'-phosphate
  modified_base 4: mod_base = OTHER; note = 2'-O-methyluridine-3'-phosphate
  modified_base 5: mod_base = OTHER; note = 2'-O-methylguanosine-3'-phosphate
  modified_base 6: mod_base = OTHER; note = 2'-deoxy-2'-fluoroguanosine-3'-phosphate
  modified_base 7: mod_base = OTHER; note = 2'-O-methyluridine-3'-phosphate
  modified_base 8: mod_base = OTHER; note = 2'-O-methyluridine-3'-phosphate
  modified_base 9: mod_base = OTHER; note = 2'-deoxy-2'-fluoroadenosine-3'-phosphate
  modified_base 10: mod_base = OTHER; note = 2'-O-methylcytidine-3'-phosphate
  modified_base 11: mod_base = OTHER; note = 2'-O-methyladenosine-3'-phosphate
  modified_base 12: mod_base = OTHER; note = 2'-O-methyluridine-3'-phosphate
  modified_base 13: mod_base = OTHER; note = 2'-O-methylguanosine-3'-phosphate
  modified_base 14: mod_base = OTHER; note = 2'-deoxy-2'-fluoroadenosine-3'-phosphate
  modified_base 15: mod_base = OTHER; note = 2'-O-methyladenosine-3'-phosphate
  modified_base 16: mod_base = OTHER; note = 2'-deoxy-2'-fluoroadenosine-3'-phosphate
  modified_base 17: mod_base = OTHER; note = 2'-O-methyluridine-3'-phosphate
  modified_base 18: mod_base = OTHER; note = 2'-O-methylcytidine-3'-phosphate
  modified_base 19: mod_base = OTHER; note = 2'-O-methylcytidine-3'-phosphate
  modified_base 20: mod_base = OTHER; note = 2'-O-methylcytidine-3'-phosphate
  modified_base 21: mod_base = OTHER; note = 2'-O-methyladenosine-3'-phosphorothioate
  modified_base 22: mod_base = OTHER; note = 2'-O-methyluridine-3'-phosphorothioate
  modified_base 23: mod_base = OTHER; note = 2'-O-methylcytidine
tcttggttacatgaaatcccatc

SEQ ID NO: 37 - DNA, 23 bp, synthetic construct
  source 1..23: mol_type = other DNA
  modified_base 1: mod_base = OTHER; note = 2'-O-methyluridine-3'-phosphorothioate
  modified_base 2: mod_base = OTHER; note = 2'-deoxycytidine-3'-phosphorothioate
  modified_base 3: mod_base = OTHER; note = 2'-O-methyluridine-3'-phosphate
  modified_base 4: mod_base = OTHER; note = 2'-O-methyluridine-3'-phosphate
  modified_base 5: mod_base = OTHER; note = 2'-O-methylguanosine-3'-phosphate
  modified_base 6: mod_base = OTHER; note = 2'-O-methylguanosine-3'-phosphate
  modified_base 7: mod_base = OTHER; note = 2'-O-methyluridine-3'-phosphate
  modified_base 8: mod_base = OTHER; note = 2'-O-methyluridine-3'-phosphate
  modified_base 9: mod_base = OTHER; note = 2'-O-methyladenosine-3'-phosphate
  modified_base 11: mod_base = OTHER; note = 2'-O-methyladenosine-3'-phosphate
  modified_base 12: mod_base = OTHER; note = 2'-O-methyluridine-3'-phosphate
  modified_base 13: mod_base = OTHER; note = 2'-O-methylguanosine-3'-phosphate
  modified_base 15: mod_base = OTHER; note = 2'-O-methyladenosine-3'-phosphate
  modified_base 16: mod_base = OTHER; note = 2'-O-methyladenosine-3'-phosphate
  modified_base 17: mod_base = OTHER; note = 2'-O-methyluridine-3'-phosphate
  modified_base 18: mod_base = OTHER; note = 2'-O-methylcytidine-3'-phosphate
  modified_base 19: mod_base = OTHER; note = 2'-O-methylcytidine-3'-phosphate
  modified_base 20: mod_base = OTHER; note = 2'-O-methylcytidine-3'-phosphate
  modified_base 21: mod_base = OTHER; note = 2'-O-methyladenosine-3'-phosphorothioate
  modified_base 22: mod_base = OTHER; note = 2'-O-methyluridine-3'-phosphorothioate
  modified_base 23: mod_base = OTHER; note = 2'-O-methylcytidine
  misc_feature 1: note = RNA
  misc_feature 3..9: note = RNA
  misc_feature 11..13: note = RNA
  misc_feature 15..23: note = RNA
  misc_feature 2: note = DNA
  misc_feature 10: note = DNA
  misc_feature 14: note = DNA
tcttggttacatgaaatcccatc

SEQ ID NO: 38 - RNA, 23 nt, synthetic construct
  source 1..23: mol_type = other RNA
  modified_base 1: mod_base = OTHER; note = 2'-O-methyluridine-3'-phosphorothioate
  modified_base 2: mod_base = OTHER; note = 2'-deoxy-2'-fluorocytidine-3'-phosphorothioate
  modified_base 3: mod_base = OTHER; note = 2'-O-methyluridine-3'-phosphate
  modified_base 4: mod_base = OTHER; note = 2'-O-methyluridine-3'-phosphate
  modified_base 5: mod_base = OTHER; note = 2'-O-methylguanosine-3'-phosphate
  modified_base 6: mod_base = OTHER; note = 2'-deoxy-2'-fluoroguanosine-3'-phosphate
  modified_base 7: mod_base = OTHER; note = 2'-O-methyluridine-3'-phosphate
  modified_base 8: mod_base = OTHER; note = 2'-deoxy-2'-fluorouridine-3'-phosphate
  modified_base 9: mod_base = OTHER; note = 2'-deoxy-2'-fluoroadenosine-3'-phosphate
  modified_base 10: mod_base = OTHER; note = 2'-O-methylcytidine-3'-phosphate
  modified_base 11: mod_base = OTHER; note = 2'-O-methyladenosine-3'-phosphate
  modified_base 12: mod_base = OTHER; note = 2'-O-methyluridine-3'-phosphate
  modified_base 13: mod_base = OTHER; note = 2'-O-methylguanosine-3'-phosphate
  modified_base 14: mod_base = OTHER; note = 2'-deoxy-2'-fluoroadenosine-3'-phosphate
  modified_base 15: mod_base = OTHER; note = 2'-O-methyladenosine-3'-phosphate
  modified_base 16: mod_base = OTHER; note = 2'-deoxy-2'-fluoroadenosine-3'-phosphate
  modified_base 17: mod_base = OTHER; note = 2'-O-methyluridine-3'-phosphate
  modified_base 18: mod_base = OTHER; note = 2'-O-methylcytidine-3'-phosphate
  modified_base 19: mod_base = OTHER; note = 2'-O-methylcytidine-3'-phosphate
  modified_base 20: mod_base = OTHER; note = 2'-O-methylcytidine-3'-phosphate
  modified_base 21: mod_base = OTHER; note = 2'-O-methyladenosine-3'-phosphorothioate
  modified_base 22: mod_base = OTHER; note = 2'-O-methyluridine-3'-phosphorothioate
  modified_base 23: mod_base = OTHER; note = 2'-O-methylcytidine
tcttggttacatgaaatcccatc

SEQ ID NO: 39 - RNA, 23 nt, synthetic construct
  source 1..23: mol_type = other RNA
  modified_base 1: mod_base = OTHER; note = 2'-O-methyluridine-3'-phosphorothioate
  modified_base 2: mod_base = OTHER; note = 2'-deoxy-2'-fluorocytidine-3'-phosphorothioate
  modified_base 3: mod_base = OTHER; note = 2'-O-methyluridine-3'-phosphate
  modified_base 4: mod_base = OTHER; note = 2'-O-methyluridine-3'-phosphate
  modified_base 5: mod_base = OTHER; note = 2'-O-methylguanosine-3'-phosphate
  modified_base 6: mod_base = OTHER; note = 2'-O-methylguanosine-3'-phosphate
  modified_base 7: mod_base = OTHER; note = 2'-O-methyluridine-3'-phosphate
  modified_base 8: mod_base = OTHER; note = 2'-O-methyluridine-3'-phosphate
  modified_base 9: mod_base = OTHER; note = 2'-O-methyladenosine-3'-phosphate
  modified_base 10: mod_base = OTHER; note = 2'-O-methylcytidine-3'-phosphate
  modified_base 11: mod_base = OTHER; note = 2'-O-methyladenosine-3'-phosphate
  modified_base 12: mod_base = OTHER; note = 2'-O-methyluridine-3'-phosphate
  modified_base 13: mod_base = OTHER; note = 2'-O-methylguanosine-3'-phosphate
  modified_base 14: mod_base = OTHER; note = 2'-deoxy-2'-fluoroadenosine-3'-phosphate
  modified_base 15: mod_base = OTHER; note = 2'-O-methyladenosine-3'-phosphate
  modified_base 16: mod_base = OTHER; note = 2'-O-methyladenosine-3'-phosphate
  modified_base 17: mod_base = OTHER; note = 2'-O-methyluridine-3'-phosphate
  modified_base 18: mod_base = OTHER; note = 2'-O-methylcytidine-3'-phosphate
  modified_base 19: mod_base = OTHER; note = 2'-O-methylcytidine-3'-phosphate
  modified_base 20: mod_base = OTHER; note = 2'-O-methylcytidine-3'-phosphate
  modified_base 21: mod_base = OTHER; note = 2'-O-methyladenosine-3'-phosphorothioate
  modified_base 22: mod_base = OTHER; note = 2'-O-methyluridine-3'-phosphorothioate
  modified_base 23: mod_base = OTHER; note = 2'-O-methylcytidine
tcttggttacatgaaatcccatc

SEQ ID NO: 40 - RNA, 23 nt, synthetic construct
  source 1..23: mol_type = other RNA
  modified_base 1: mod_base = OTHER; note = 2'-O-methyluridine-3'-phosphorothioate 5'phosphate
  modified_base 2: mod_base = OTHER; note = 2'-deoxy-2'-fluorocytidine-3'-phosphorothioate
  modified_base 3: mod_base = OTHER; note = 2'-O-methyluridine-3'-phosphate
  modified_base 4: mod_base = OTHER; note = 2'-O-methyluridine-3'-phosphate
  modified_base 5: mod_base = OTHER; note = 2'-O-methylguanosine-3'-phosphate
  modified_base 6: mod_base = OTHER; note = 2'-O-methylguanosine-3'-phosphate
  modified_base 7: mod_base = OTHER; note = 2'-O-methyluridine-3'-phosphate
  modified_base 8: mod_base = OTHER; note = 2'-O-methyluridine-3'-phosphate
  modified_base 9: mod_base = OTHER; note = 2'-O-methyladenosine-3'-phosphate
  modified_base 10: mod_base = OTHER; note = 2'-O-methylcytidine-3'-phosphate
  modified_base 11: mod_base = OTHER; note = 2'-O-methyladenosine-3'-phosphate
  modified_base 12: mod_base = OTHER; note = 2'-O-methyluridine-3'-phosphate
  modified_base 13: mod_base = OTHER; note = 2'-O-methylguanosine-3'-phosphate
  modified_base 14: mod_base = OTHER; note = 2'-deoxy-2'-fluoroadenosine-3'-phosphate
  modified_base 15: mod_base = OTHER; note = 2'-O-methyladenosine-3'-phosphate
  modified_base 16: mod_base = OTHER; note = 2'-O-methyladenosine-3'-phosphate
  modified_base 17: mod_base = OTHER; note = 2'-O-methyluridine-3'-phosphate
  modified_base 18: mod_base = OTHER; note = 2'-O-methylcytidine-3'-phosphate
  modified_base 19: mod_base = OTHER; note = 2'-O-methylcytidine-3'-phosphate
  modified_base 20: mod_base = OTHER; note = 2'-O-methylcytidine-3'-phosphate
  modified_base 21: mod_base = OTHER; note = 2'-O-methyladenosine-3'-phosphorothioate
  modified_base 22: mod_base = OTHER; note = 2'-O-methyluridine-3'-phosphorothioate
  modified_base 23: mod_base = OTHER; note = 2'-O-methylcytidine
tcttggttacatgaaatcccatc

SEQ ID NO: 41 - DNA, 23 bp, synthetic construct
  source 1..23: mol_type = other DNA
  modified_base 1: mod_base = OTHER; note = 2'-O-methyluridine-3'-phosphorothioate 5'phosphate
  modified_base 2: mod_base = OTHER; note = 2'-deoxycytidine-3'-phosphorothioate
  modified_base 3: mod_base = OTHER; note = 2'-O-methyluridine-3'-phosphate
  modified_base 4: mod_base = OTHER; note = 2'-O-methyluridine-3'-phosphate
  modified_base 5: mod_base = OTHER; note = 2'-O-methylguanosine-3'-phosphate
  modified_base 6: mod_base = OTHER; note = 2'-O-methylguanosine-3'-phosphate
  modified_base 7: mod_base = OTHER; note = 2'-O-methyluridine-3'-phosphate
  modified_base 8: mod_base = OTHER; note = 2'-O-methyluridine-3'-phosphate
  modified_base 9: mod_base = OTHER; note = 2'-O-methyladenosine-3'-phosphate
  modified_base 11: mod_base = OTHER; note = 2'-O-methyladenosine-3'-phosphate
  modified_base 12: mod_base = OTHER; note = 2'-O-methyluridine-3'-phosphate
  modified_base 13: mod_base = OTHER; note = 2'-O-methylguanosine-3'-phosphate
  modified_base 15: mod_base = OTHER; note = 2'-O-methyladenosine-3'-phosphate
  modified_base 16: mod_base = OTHER; note = 2'-O-methyladenosine-3'-phosphate
  modified_base 17: mod_base = OTHER; note = 2'-O-methyluridine-3'-phosphate
  modified_base 18: mod_base = OTHER; note = 2'-O-methylcytidine-3'-phosphate
  modified_base 19: mod_base = OTHER; note = 2'-O-methylcytidine-3'-phosphate
  modified_base 20: mod_base = OTHER; note = 2'-O-methylcytidine-3'-phosphate
  modified_base 21: mod_base = OTHER; note = 2'-O-methyladenosine-3'-phosphorothioate
  modified_base 22: mod_base = OTHER; note = 2'-O-methyluridine-3'-phosphorothioate
  modified_base 23: mod_base = OTHER; note = 2'-O-methylcytidine
  misc_feature 1: note = RNA
  misc_feature 3..9: note = RNA
  misc_feature 11..13: note = RNA
  misc_feature 15..23: note = RNA
  misc_feature 2: note = DNA
  misc_feature 10: note = DNA
  misc_feature 14: note = DNA
tcttggttacatgaaatcccatc

SEQ ID NO: 42 - DNA, 23 bp, synthetic construct
  source 1..23: mol_type = other DNA
  modified_base 1: mod_base = OTHER; note = 2'-O-methyluridine-3'-phosphorothioate
  modified_base 2: mod_base = OTHER; note = 2'-deoxycytidine-3'-phosphorothioate
  modified_base 3: mod_base = OTHER; note = 2'-O-methyluridine-3'-phosphate
  modified_base 4: mod_base = OTHER; note = 2'-O-methyluridine-3'-phosphate
  modified_base 5: mod_base = OTHER; note = 2'-O-methylguanosine-3'-phosphate
  modified_base 6: mod_base = OTHER; note = 2'-O-methylguanosine-3'-phosphate
  modified_base 7: mod_base = OTHER; note = 2'-O-methyluridine-3'-phosphate
  modified_base 8: mod_base = OTHER; note = 2'-O-methyluridine-3'-phosphate
  modified_base 9: mod_base = OTHER; note = 2'-O-methyladenosine-3'-phosphate
  modified_base 11: mod_base = OTHER; note = 2'-O-methyladenosine-3'-phosphate
  modified_base 12: mod_base = OTHER; note = 2'-O-methyluridine-3'-phosphate
  modified_base 13: mod_base = OTHER; note = 2'-O-methylguanosine-3'-phosphate
  modified_base 15: mod_base = OTHER; note = 2'-O-methyladenosine-3'-phosphate
  modified_base 16: mod_base = OTHER; note = 2'-O-methyladenosine-3'-phosphate
  modified_base 17: mod_base = OTHER; note = 2'-O-methyluridine-3'-phosphate
  modified_base 18: mod_base = OTHER; note = 2'-O-methylcytidine-3'-phosphate
  modified_base 19: mod_base = OTHER; note = 2'-O-methylcytidine-3'-phosphate
  modified_base 20: mod_base = OTHER; note = 2'-O-methylcytidine-3'-phosphate
  modified_base 21: mod_base = OTHER; note = 2'-O-methyladenosine-3'-phosphorothioate
  modified_base 22: mod_base = OTHER; note = 2'-O-methyluridine-3'-phosphorothioate
  modified_base 23: mod_base = OTHER; note = 2'-O-methylcytidine
  misc_feature 1: note = RNA
  misc_feature 3..9: note = RNA
  misc_feature 11..13: note = RNA
  misc_feature 15..23: note = RNA
  misc_feature 2: note = DNA
  misc_feature 10: note = DNA
  misc_feature 14: note = DNA
tcttggttacatgaaatcccatc

SEQ ID NO: 43 - RNA, 21 nt, synthetic construct
  source 1..21: mol_type = other RNA
  modified_base 1: mod_base = OTHER; note = 2'-O-methyluridine-3'-phosphorothioate
  modified_base 2: mod_base = OTHER; note = 2'-O-methylguanosine-3'-phosphorothioate
  modified_base 3: mod_base = OTHER; note = 2'-O-methylguanosine-3'-phosphate
  modified_base 4: mod_base = OTHER; note = 2'-O-methylguanosine-3'-phosphate
  modified_base 5: mod_base = OTHER; note = 2'-O-methyladenosine-3'-phosphate
  modified_base 6: mod_base = OTHER; note = 2'-O-methyluridine-3'-phosphate
  modified_base 7: mod_base = OTHER; note = 2'-deoxy-2'-fluorouridine-3'-phosphate
  modified_base 8: mod_base = OTHER; note = 2'-O-methyluridine-3'-phosphate
  modified_base 9: mod_base = OTHER; note = 2'-deoxy-2'-fluorocytidine-3'-phosphate
  modified_base 10: mod_base = OTHER; note = 2'-deoxy-2'-fluoroadenosine-3'-phosphate
  modified_base 11: mod_base = OTHER; note = 2'-deoxy-2'-fluorouridine-3'-phosphate
  modified_base 12: mod_base = OTHER; note = 2'-O-methylguanosine-3'-phosphate
  modified_base 13: mod_base = OTHER; note = 2'-O-methyluridine-3'-phosphate
  modified_base 14: mod_base = OTHER; note = 2'-O-methyladenosine-3'-phosphate
  modified_base 15: mod_base = OTHER; note = 2'-O-methyladenosine-3'-phosphate
  modified_base 16: mod_base = OTHER; note = 2'-O-methylcytidine-3'-phosphate
  modified_base 17: mod_base = OTHER; note = 2'-O-methylcytidine-3'-phosphate
  modified_base 18: mod_base = OTHER; note = 2'-O-methyladenosine-3'-phosphate
  modified_base 19: mod_base = OTHER; note = 2'-O-methyladenosine-3'-phosphate
  modified_base 20: mod_base = OTHER; note = 2'-O-methylguanosine-3'-phosphate
  modified_base 21: mod_base = OTHER; note = 2'-O-methyladenosine-3'-phosphate ((2S,4R)-1-[29-[[2-(acetylamino)-2-deoxy-beta-D-galactopyra nosyl]oxy]-14,14-bis[[3-[[3-[[5-[[2-(acetylamino)-2-deoxy-b eta-D-galactopyranosyl]oxy]-1-oxopentyl]amino]propyl]amino] -3-oxopropoxy]methyl]-1,12,19,25-tetraoxo-16-oxa-13,20,24-t riazanonacos-1-yl]-4-hydroxy-2-pyrrolidinyl)methyl ester
tgggatttcatgtaaccaaga

SEQ ID NO: 44 - RNA, 21 nt, synthetic construct
  source 1..21: mol_type = other RNA
  modified_base 1: mod_base = OTHER; note = 2'-O-methyluridine-3'-phosphorothioate
  modified_base 2: mod_base = OTHER; note = 2'-O-methylguanosine-3'-phosphorothioate
  modified_base 3: mod_base = OTHER; note = 2'-O-methylguanosine-3'-phosphate
  modified_base 4: mod_base = OTHER; note = 2'-O-methylguanosine-3'-phosphate
  modified_base 5: mod_base = OTHER; note = 2'-O-methyladenosine-3'-phosphate
  modified_base 6: mod_base = OTHER; note = 2'-O-methyluridine-3'-phosphate
  modified_base 7: mod_base = OTHER; note = 2'-deoxy-2'-fluorouridine-3'-phosphate
  modified_base 8: mod_base = OTHER; note = 2'-O-methyluridine-3'-phosphate
  modified_base 9: mod_base = OTHER; note = 2'-deoxy-2'-fluorocytidine-3'-phosphate
  modified_base 10: mod_base = OTHER; note = 2'-deoxy-2'-fluoroadenosine-3'-phosphate
  modified_base 11: mod_base = OTHER; note = 2'-deoxy-2'-fluorouridine-3'-phosphate
  modified_base 12: mod_base = OTHER; note = 2'-O-methylguanosine-3'-phosphate
  modified_base 13: mod_base = OTHER; note = 2'-O-methyluridine-3'-phosphate
  modified_base 14: mod_base = OTHER; note = 2'-O-methyladenosine-3'-phosphate
  modified_base 15: mod_base = OTHER; note = 2'-O-methyladenosine-3'-phosphate
  modified_base 16: mod_base = OTHER; note = 2'-O-methylcytidine-3'-phosphate
  modified_base 17: mod_base = OTHER; note = 2'-O-methylcytidine-3'-phosphate
  modified_base 18: mod_base = OTHER; note = 2'-O-methyladenosine-3'-phosphate
  modified_base 19: mod_base = OTHER; note = 2'-O-methyladenosine-3'-phosphate
  modified_base 20: mod_base = OTHER; note = 2'-O-methylguanosine-3'-phosphate
  modified_base 21: mod_base = OTHER; note = 2'-O-methyladenosine-3'-phosphate ((2S,4R)-1-[29-[[2-(acetylamino)-2-deoxy-beta-D-galactopyra nosyl]oxy]-14,14-bis[[3-[[3-[[5-[[2-(acetylamino)-2-deoxy-b eta-D-galactopyranosyl]oxy]-1-oxopentyl]amino]propyl]amino] -3-oxopropoxy]methyl]-1,12,19,25-tetraoxo-16-oxa-13,20,24-t riazanonacos-1-yl]-4-hydroxy-2-pyrrolidinyl)methyl ester
tgggatttcatgtaaccaaga

SEQ ID NO: 45 - RNA, 21 nt, synthetic construct
  source 1..21: mol_type = other RNA
  modified_base 1: mod_base = OTHER; note = 2'-O-methyluridine-3'-phosphorothioate
  modified_base 2: mod_base = OTHER; note = 2'-O-methylguanosine-3'-phosphorothioate
  modified_base 3: mod_base = OTHER; note = 2'-O-methylguanosine-3'-phosphate
  modified_base 4: mod_base = OTHER; note = 2'-O-methylguanosine-3'-phosphate
  modified_base 5: mod_base = OTHER; note = 2'-O-methyladenosine-3'-phosphate
  modified_base 6: mod_base = OTHER; note = 2'-O-methyluridine-3'-phosphate
  modified_base 7: mod_base = OTHER; note = 2'-deoxy-2'-fluorouridine-3'-phosphate
  modified_base 8: mod_base = OTHER; note = 2'-O-methyluridine-3'-phosphate
  modified_base 9: mod_base = OTHER; note = 2'-deoxy-2'-fluorocytidine-3'-phosphate
  modified_base 10: mod_base = OTHER; note = 2'-deoxy-2'-fluoroadenosine-3'-phosphate
  modified_base 11: mod_base = OTHER; note = 2'-deoxy-2'-fluorouridine-3'-phosphate
  modified_base 12: mod_base = OTHER; note = 2'-O-methylguanosine-3'-phosphate
  modified_base 13: mod_base = OTHER; note = 2'-O-methyluridine-3'-phosphate
  modified_base 14: mod_base = OTHER; note = 2'-O-methyladenosine-3'-phosphate
  modified_base 15: mod_base = OTHER; note = 2'-O-methyladenosine-3'-phosphate
  modified_base 16: mod_base = OTHER; note = 2'-O-methylcytidine-3'-phosphate
  modified_base 17: mod_base = OTHER; note = 2'-O-methylcytidine-3'-phosphate
  modified_base 18: mod_base = OTHER; note = 2'-O-methyladenosine-3'-phosphate
  modified_base 19: mod_base = OTHER; note = 2'-O-methyladenosine-3'-phosphate
  modified_base 20: mod_base = OTHER; note = 2'-O-methylguanosine-3'-phosphate
  modified_base 21: mod_base = OTHER; note = 2'-O-methyladenosine-3'-phosphate ((2S,4R)-1-[29-[[2-(acetylamino)-2-deoxy-beta-D-galactopyra nosyl]oxy]-14,14-bis[[3-[[3-[[5-[[2-(acetylamino)-2-deoxy-b eta-D-galactopyranosyl]oxy]-1-oxopentyl]amino]propyl]amino] -3-oxopropoxy]methyl]-1,12,19,25-tetraoxo-16-oxa-13,20,24-t riazanonacos-1-yl]-4-hydroxy-2-pyrrolidinyl)methyl ester
tgggatttcatgtaaccaaga

SEQ ID NO: 46 - RNA, 21 nt, synthetic construct
  source 1..21: mol_type = other RNA
  modified_base 1: mod_base = OTHER; note = 2'-O-methyluridine-3'-phosphorothioate
  modified_base 2: mod_base = OTHER; note = 2'-O-methylguanosine-3'-phosphorothioate
  modified_base 3: mod_base = OTHER; note = 2'-O-methylguanosine-3'-phosphate
  modified_base 4: mod_base = OTHER; note = 2'-O-methylguanosine-3'-phosphate
  modified_base 5: mod_base = OTHER; note = 2'-O-methyladenosine-3'-phosphate
  modified_base 6: mod_base = OTHER; note = 2'-O-methyluridine-3'-phosphate
  modified_base 7: mod_base = OTHER; note = 2'-deoxy-2'-fluorouridine-3'-phosphate
  modified_base 8: mod_base = OTHER; note = 2'-O-methyluridine-3'-phosphate
  modified_base 9: mod_base = OTHER; note = 2'-deoxy-2'-fluorocytidine-3'-phosphate
  modified_base 10: mod_base = OTHER; note = 2'-deoxy-2'-fluoroadenosine-3'-phosphate
  modified_base 11: mod_base = OTHER; note = 2'-deoxy-2'-fluorouridine-3'-phosphate
  modified_base 12: mod_base = OTHER; note = 2'-O-methylguanosine-3'-phosphate
  modified_base 13: mod_base = OTHER; note = 2'-O-methyluridine-3'-phosphate
  modified_base 14: mod_base = OTHER; note = 2'-O-methyladenosine-3'-phosphate
  modified_base 15: mod_base = OTHER; note = 2'-O-methyladenosine-3'-phosphate
  modified_base 16: mod_base = OTHER; note = 2'-O-methylcytidine-3'-phosphate
  modified_base 17: mod_base = OTHER; note = 2'-O-methylcytidine-3'-phosphate
  modified_base 18: mod_base = OTHER; note = 2'-O-methyladenosine-3'-phosphate
  modified_base 19: mod_base = OTHER; note = 2'-O-methyladenosine-3'-phosphate
  modified_base 20: mod_base = OTHER; note = 2'-O-methylguanosine-3'-phosphate
  modified_base 21: mod_base = OTHER; note = 2'-O-methyladenosine-3'-phosphate ((2S,4R)-1-[29-[[2-(acetylamino)-2-deoxy-beta-D-galactopyra nosyl]oxy]-14,14-bis[[3-[[3-[[5-[[2-(acetylamino)-2-deoxy-b eta-D-galactopyranosyl]oxy]-1-oxopentyl]amino]propyl]amino] -3-oxopropoxy]methyl]-1,12,19,25-tetraoxo-16-oxa-13,20,24-t riazanonacos-1-yl]-4-hydroxy-2-pyrrolidinyl)methyl ester
tgggatttcatgtaaccaaga

SEQ ID NO: 47 - RNA, 23 nt, synthetic construct
  source 1..23: mol_type = other RNA
  modified_base 1: mod_base = OTHER; note = 2'-O-methyluridine-3'-phosphorothioate
  modified_base 2: mod_base = OTHER; note = 2'-deoxy-2'-fluorocytidine-3'-phosphorothioate
  modified_base 3: mod_base = OTHER; note = 2'-O-methyluridine-3'-phosphate
  modified_base 4: mod_base = OTHER; note = 2'-O-methyluridine-3'-phosphate
  modified_base 5: mod_base = OTHER; note = 2'-O-methylguanosine-3'-phosphate
  modified_base 6: mod_base = OTHER; note = 2'-O-methylguanosine-3'-phosphate
  modified_base 7: mod_base = OTHER; note = 2'-O-methyluridine-3'-phosphate
  modified_base 8: mod_base = OTHER; note = 2'-O-methyluridine-3'-phosphate
  modified_base 9: mod_base = OTHER; note = 2'-O-methyladenosine-3'-phosphate
  modified_base 10: mod_base = OTHER; note = 2'-O-methylcytidine-3'-phosphate
  modified_base 11: mod_base = OTHER; note = 2'-O-methyladenosine-3'-phosphate
  modified_base 12: mod_base = OTHER; note = 2'-O-methyluridine-3'-phosphate
  modified_base 13: mod_base = OTHER; note = 2'-O-methylguanosine-3'-phosphate
  modified_base 14: mod_base = OTHER; note = 2'-deoxy-2'-fluoroadenosine-3'-phosphate
  modified_base 15: mod_base = OTHER; note = 2'-O-methyladenosine-3'-phosphate
  modified_base 16: mod_base = OTHER; note = 2'-O-methyladenosine-3'-phosphate
  modified_base 17: mod_base = OTHER; note = 2'-O-methyluridine-3'-phosphate
  modified_base 18: mod_base = OTHER; note = 2'-O-methylcytidine-3'-phosphate
  modified_base 19: mod_base = OTHER; note = 2'-O-methylcytidine-3'-phosphate
  modified_base 20: mod_base = OTHER; note = 2'-O-methylcytidine-3'-phosphate
  modified_base 21: mod_base = OTHER; note = 2'-O-methyladenosine-3'-phosphorothioate
  modified_base 22: mod_base = OTHER; note = 2'-O-methyluridine-3'-phosphorothioate
  modified_base 23: mod_base = OTHER; note = 2'-O-methylcytidine
tcttggttacatgaaatcccatc

SEQ ID NO: 48 - RNA, 23 nt, synthetic construct
  source 1..23: mol_type = other RNA
  modified_base 1: mod_base = OTHER; note = 2'-O-methyluridine-3'-phosphorothioate
  modified_base 2: mod_base = OTHER; note = 2'-deoxy-2'-fluorocytidine-3'-phosphorothioate
  modified_base 3: mod_base = OTHER; note = 2'-O-methyluridine-3'-phosphate
  modified_base 4: mod_base = OTHER; note = 2'-O-methyluridine-3'-phosphate
  modified_base 5: mod_base = OTHER; note = 2'-O-methylguanosine-3'-phosphate
  modified_base 6: mod_base = OTHER; note = 2'-deoxy-2'-fluoroguanosine-3'-phosphate
  modified_base 7: mod_base = OTHER; note = 2'-O-methyluridine-3'-phosphate
  modified_base 8: mod_base = OTHER; note = 2'-O-methyluridine-3'-phosphate
  modified_base 9: mod_base = OTHER; note = 2'-deoxy-2'-fluoroadenosine-3'-phosphate
  modified_base 10: mod_base = OTHER; note = 2'-O-methylcytidine-3'-phosphate
  modified_base 11: mod_base = OTHER; note = 2'-O-methyladenosine-3'-phosphate
  modified_base 12: mod_base = OTHER; note = 2'-O-methyluridine-3'-phosphate
  modified_base 13: mod_base = OTHER; note = 2'-O-methylguanosine-3'-phosphate
  modified_base 14: mod_base = OTHER; note = 2'-deoxy-2'-fluoroadenosine-3'-phosphate
  modified_base 15: mod_base = OTHER; note = 2'-O-methyladenosine-3'-phosphate
  modified_base 16: mod_base = OTHER; note = 2'-deoxy-2'-fluoroadenosine-3'-phosphate
  modified_base 17: mod_base = OTHER; note = 2'-O-methyluridine-3'-phosphate
  modified_base 18: mod_base = OTHER; note = 2'-O-methylcytidine-3'-phosphate
  modified_base 19: mod_base = OTHER; note = 2'-O-methylcytidine-3'-phosphate
  modified_base 20: mod_base = OTHER; note = 2'-O-methylcytidine-3'-phosphate
  modified_base 21: mod_base = OTHER; note = 2'-O-methyladenosine-3'-phosphorothioate
  modified_base 22: mod_base = OTHER; note = 2'-O-methyluridine-3'-phosphorothioate
  modified_base 23: mod_base = OTHER; note = 2'-O-methylcytidine
tcttggttacatgaaatcccatc

SEQ ID NO: 49 - RNA, 23 nt, synthetic construct
  source 1..23: mol_type = other RNA
  modified_base 1: mod_base = OTHER; note = 2'-deoxy-2'-fluorouridine-3'-phosphorothioate
  modified_base 2: mod_base = OTHER; note = 2'-deoxy-2'-fluorocytidine-3'-phosphorothioate
  modified_base 3: mod_base = OTHER; note = 2'-O-methyluridine-3'-phosphate
  modified_base 4: mod_base = OTHER; note = 2'-O-methyluridine-3'-phosphate
  modified_base 5: mod_base = OTHER; note = 2'-O-methylguanosine-3'-phosphate
  modified_base 6: mod_base = OTHER; note = 2'-deoxy-2'-fluoroguanosine-3'-phosphate
  modified_base 7: mod_base = OTHER; note = 2'-O-methyluridine-3'-phosphate
  modified_base 8: mod_base = OTHER; note = 2'-O-methyluridine-3'-phosphate
  modified_base 9: mod_base = OTHER; note = 2'-deoxy-2'-fluoroadenosine-3'-phosphate
  modified_base 10: mod_base = OTHER; note = 2'-O-methylcytidine-3'-phosphate
  modified_base 11: mod_base = OTHER; note = 2'-O-methyladenosine-3'-phosphate
  modified_base 12: mod_base = OTHER; note = 2'-O-methyluridine-3'-phosphate
  modified_base 13: mod_base = OTHER; note = 2'-O-methylguanosine-3'-phosphate
  modified_base 14: mod_base = OTHER; note = 2'-deoxy-2'-fluoroadenosine-3'-phosphate
  modified_base 15: mod_base = OTHER; note = 2'-O-methyladenosine-3'-phosphate
  modified_base 16: mod_base = OTHER; note = 2'-deoxy-2'-fluoroadenosine-3'-phosphate
  modified_base 17: mod_base = OTHER; note = 2'-O-methyluridine-3'-phosphate
  modified_base 18: mod_base = OTHER; note = 2'-O-methylcytidine-3'-phosphate
  modified_base 19: mod_base = OTHER; note = 2'-O-methylcytidine-3'-phosphate
  modified_base 20: mod_base = OTHER; note = 2'-O-methylcytidine-3'-phosphate
  modified_base 21: mod_base = OTHER; note = 2'-O-methyladenosine-3'-phosphorothioate
  modified_base 22: mod_base = OTHER; note = 2'-O-methyluridine-3'-phosphorothioate
  modified_base 23: mod_base = OTHER; note = 2'-O-methylcytidine
tcttggttacatgaaatcccatc

SEQ ID NO: 50 - RNA, 23 nt, synthetic construct
  source 1..23: mol_type = other RNA
  modified_base 1: mod_base = OTHER; note = 2'-O-methyluridine-3'-phosphorothioate 5'-(E)-Vinylphosphonate
  modified_base 2: mod_base = OTHER; note = 2'-deoxy-2'-fluorocytidine-3'-phosphorothioate
  modified_base 3: mod_base = OTHER; note = 2'-O-methyluridine-3'-phosphate
  modified_base 4: mod_base = OTHER; note = 2'-O-methyluridine-3'-phosphate
  modified_base 5: mod_base = OTHER; note = 2'-O-methylguanosine-3'-phosphate
  modified_base 6: mod_base = OTHER; note = 2'-deoxy-2'-fluoroguanosine-3'-phosphate
  modified_base 7: mod_base = OTHER; note = 2'-O-methyluridine-3'-phosphate
  modified_base 8: mod_base = OTHER; note = 2'-O-methyluridine-3'-phosphate
  modified_base 9: mod_base = OTHER; note = 2'-deoxy-2'-fluoroadenosine-3'-phosphate
  modified_base 10: mod_base = OTHER; note = 2'-O-methylcytidine-3'-phosphate
  modified_base 11: mod_base = OTHER; note = 2'-O-methyladenosine-3'-phosphate
  modified_base 12: mod_base = OTHER; note = 2'-O-methyluridine-3'-phosphate
  modified_base 13: mod_base = OTHER; note = 2'-O-methylguanosine-3'-phosphate
  modified_base 14: mod_base = OTHER; note = 2'-deoxy-2'-fluoroadenosine-3'-phosphate
  modified_base 15: mod_base = OTHER; note = 2'-O-methyladenosine-3'-phosphate
  modified_base 16: mod_base = OTHER; note = 2'-deoxy-2'-fluoroadenosine-3'-phosphate
  modified_base 17: mod_base = OTHER; note = 2'-O-methyluridine-3'-phosphate
  modified_base 18: mod_base = OTHER; note = 2'-O-methylcytidine-3'-phosphate
  modified_base 19: mod_base = OTHER; note = 2'-O-methylcytidine-3'-phosphate
  modified_base 20: mod_base = OTHER; note = 2'-O-methylcytidine-3'-phosphate
  modified_base 21: mod_base = OTHER; note = 2'-O-methyladenosine-3'-phosphorothioate
  modified_base 22: mod_base = OTHER; note = 2'-O-methyluridine-3'-phosphorothioate
  modified_base 23: mod_base = OTHER; note = 2'-O-methylcytidine-3'-phosphate
tcttggttacatgaaatcccatc

SEQ ID NO: 51 - RNA, 21 nt, synthetic construct
  source 1..21: mol_type = other RNA
  modified_base 1: mod_base = OTHER; note = 2'-O-methyluridine-3'-phosphorothioate
  modified_base 2: mod_base = OTHER; note = 2'-O-methylguanosine-3'-phosphorothioate
  modified_base 3: mod_base = OTHER; note = 2'-O-methylguanosine-3'-phosphate
  modified_base 4: mod_base = OTHER; note = 2'-O-methylguanosine-3'-phosphate
  modified_base 5: mod_base = OTHER; note = 2'-O-methyladenosine-3'-phosphate
  modified_base 6: mod_base = OTHER; note = 2'-O-methyluridine-3'-phosphate
  modified_base 7: mod_base = OTHER; note = 2'-deoxy-2'-fluorouridine-3'-phosphate
  modified_base 8: mod_base = OTHER; note = 2'-O-methyluridine-3'-phosphate
  modified_base 9: mod_base = OTHER; note = 2'-deoxy-2'-fluorocytidine-3'-phosphate
  modified_base 10: mod_base = OTHER; note = 2'-deoxy-2'-fluoroadenosine-3'-phosphate
  modified_base 11: mod_base = OTHER; note = 2'-deoxy-2'-fluorouridine-3'-phosphate
  modified_base 12: mod_base = OTHER; note = 2'-O-methylguanosine-3'-phosphate
  modified_base 13: mod_base = OTHER; note = 2'-O-methyluridine-3'-phosphate
  modified_base 14: mod_base = OTHER; note = 2'-O-methyladenosine-3'-phosphate
  modified_base 15: mod_base = OTHER; note = 2'-O-methyladenosine-3'-phosphate
  modified_base 16: mod_base = OTHER; note = 2'-O-methylcytidine-3'-phosphate
  modified_base 17: mod_base = OTHER; note = 2'-O-methylcytidine-3'-phosphate
  modified_base 18: mod_base = OTHER; note = 2'-O-methyladenosine-3'-phosphate
  modified_base 19: mod_base = OTHER; note = 2'-O-methyladenosine-3'-phosphate
  modified_base 20: mod_base = OTHER; note = 2'-O-methylguanosine-3'-phosphate
  modified_base 21: mod_base = OTHER; note = 2'-O-methyladenosine-3'-phosphate ((2S,4R)-1-[29-[[2-(acetylamino)-2-deoxy-beta-D-galactopyra nosyl]oxy]-14,14-bis[[3-[[3-[[5-[[2-(acetylamino)-2-deoxy-b eta-D-galactopyranosyl]oxy]-1-oxopentyl]amino]propyl]amino] -3-oxopropoxy]methyl]-1,12,19,25-tetraoxo-16-oxa-13,20,24-t riazanonacos-1-yl]-4-hydroxy-2-pyrrolidinyl)methyl ester
tgggatttcatgtaaccaaga

SEQ ID NO: 52 - RNA, 21 nt, synthetic construct
  source 1..21: mol_type = other RNA
  modified_base 1: mod_base = OTHER; note = 2'-O-methyluridine-3'-phosphorothioate
  modified_base 2: mod_base = OTHER; note = 2'-O-methylguanosine-3'-phosphorothioate
  modified_base 3: mod_base = OTHER; note = 2'-O-methylguanosine-3'-phosphate
  modified_base 4: mod_base = OTHER; note = 2'-O-methylguanosine-3'-phosphate
  modified_base 5: mod_base = OTHER; note = 2'-O-methyladenosine-3'-phosphate
  modified_base 6: mod_base = OTHER; note = 2'-O-methyluridine-3'-phosphate
  modified_base 7: mod_base = OTHER; note = 2'-deoxy-2'-fluorouridine-3'-phosphate
  modified_base 8: mod_base = OTHER; note = 2'-O-methyluridine-3'-phosphate
  modified_base 9: mod_base = OTHER; note = 2'-deoxy-2'-fluorocytidine-3'-phosphate
  modified_base 10: mod_base = OTHER; note = 2'-deoxy-2'-fluoroadenosine-3'-phosphate
  modified_base 11: mod_base = OTHER; note = 2'-deoxy-2'-fluorouridine-3'-phosphate
  modified_base 12: mod_base = OTHER; note = 2'-O-methylguanosine-3'-phosphate
  modified_base 13: mod_base = OTHER; note = 2'-O-methyluridine-3'-phosphate
  modified_base 14: mod_base = OTHER; note = 2'-O-methyladenosine-3'-phosphate
  modified_base 15: mod_base = OTHER; note = 2'-O-methyladenosine-3'-phosphate
  modified_base 16: mod_base = OTHER; note = 2'-O-methylcytidine-3'-phosphate
  modified_base 17: mod_base = OTHER; note = 2'-O-methylcytidine-3'-phosphate
  modified_base 18: mod_base = OTHER; note = 2'-O-methyladenosine-3'-phosphate
  modified_base 19: mod_base = OTHER; note = 2'-O-methyladenosine-3'-phosphate
  modified_base 20: mod_base = OTHER; note = 2'-O-methylguanosine-3'-phosphate
  modified_base 21: mod_base = OTHER; note = 2'-O-methyladenosine-3'-phosphate ((2S,4R)-1-[29-[[2-(acetylamino)-2-deoxy-beta-D-galactopyra nosyl]oxy]-14,14-bis[[3-[[3-[[5-[[2-(acetylamino)-2-deoxy-b eta-D-galactopyranosyl]oxy]-1-oxopentyl]amino]propyl]amino] -3-oxopropoxy]methyl]-1,12,19,25-tetraoxo-16-oxa-13,20,24-t riazanonacos-1-yl]-4-hydroxy-2-pyrrolidinyl)methyl ester
tgggatttcatgtaaccaaga

SEQ ID NO: 53 - RNA, 21 nt, synthetic construct
  source 1..21: mol_type = other RNA
  modified_base 1: mod_base = OTHER; note = 2'-O-methyluridine-3'-phosphorothioate
  modified_base 2: mod_base = OTHER; note = 2'-O-methylguanosine-3'-phosphorothioate
  modified_base 3: mod_base = OTHER; note = 2'-O-methylguanosine-3'-phosphate
  modified_base 4: mod_base = OTHER; note = 2'-O-methylguanosine-3'-phosphate
  modified_base 5: mod_base = OTHER; note = 2'-O-methyladenosine-3'-phosphate
  modified_base 6: mod_base = OTHER; note = 2'-O-methyluridine-3'-phosphate
  modified_base 7: mod_base = OTHER; note = 2'-deoxy-2'-fluorouridine-3'-phosphate
  modified_base 8: mod_base = OTHER; note = 2'-O-methyluridine-3'-phosphate
  modified_base 9: mod_base = OTHER; note = 2'-deoxy-2'-fluorocytidine-3'-phosphate
  modified_base 10: mod_base = OTHER; note = 2'-deoxy-2'-fluoroadenosine-3'-phosphate
  modified_base 11: mod_base = OTHER; note = 2'-deoxy-2'-fluorouridine-3'-phosphate
  modified_base 12: mod_base = OTHER; note = 2'-O-methylguanosine-3'-phosphate
  modified_base 13: mod_base = OTHER; note = 2'-O-methyluridine-3'-phosphate
  modified_base 14: mod_base = OTHER; note = 2'-O-methyladenosine-3'-phosphate
  modified_base 15: mod_base = OTHER; note = 2'-O-methyladenosine-3'-phosphate
  modified_base 16: mod_base = OTHER; note = 2'-O-methylcytidine-3'-phosphate
  modified_base 17: mod_base = OTHER; note = 2'-O-methylcytidine-3'-phosphate
  modified_base 18: mod_base = OTHER; note = 2'-O-methyladenosine-3'-phosphate
  modified_base 19: mod_base = OTHER; note = 2'-O-methyladenosine-3'-phosphate
  modified_base 20: mod_base = OTHER; note = 2'-O-methylguanosine-3'-phosphate
  modified_base 21: mod_base = OTHER; note = 2'-O-methyladenosine-3'-phosphate ((2S,4R)-1-[29-[[2-(acetylamino)-2-deoxy-beta-D-galactopyra nosyl]oxy]-14,14-bis[[3-[[3-[[5-[[2-(acetylamino)-2-deoxy-b eta-D-galactopyranosyl]oxy]-1-oxopentyl]amino]propyl]amino] -3-oxopropoxy]methyl]-1,12,19,25-tetraoxo-16-oxa-13,20,24-t riazanonacos-1-yl]-4-hydroxy-2-pyrrolidinyl)methyl ester
tgggatttcatgtaaccaaga

SEQ ID NO: 54 - RNA, 21 nt, synthetic construct
  source 1..21: mol_type = other RNA
  modified_base 1: mod_base = OTHER; note = 2'-O-methyluridine-3'-phosphorothioate
  modified_base 2: mod_base = OTHER; note = 2'-O-methylguanosine-3'-phosphorothioate
  modified_base 3: mod_base = OTHER; note = 2'-O-methylguanosine-3'-phosphate
  modified_base 4: mod_base = OTHER; note = 2'-O-methylguanosine-3'-phosphate
  modified_base 5: mod_base = OTHER; note = 2'-O-methyladenosine-3'-phosphate
  modified_base 6: mod_base = OTHER; note = 2'-O-methyluridine-3'-phosphate
  modified_base 7: mod_base = OTHER; note = 2'-deoxy-2'-fluorouridine-3'-phosphate
  modified_base 8: mod_base = OTHER; note = 2'-O-methyluridine-3'-phosphate
  modified_base 9: mod_base = OTHER; note = 2'-deoxy-2'-fluorocytidine-3'-phosphate
  modified_base 10: mod_base = OTHER; note = 2'-deoxy-2'-fluoroadenosine-3'-phosphate
  modified_base 11: mod_base = OTHER; note = 2'-deoxy-2'-fluorouridine-3'-phosphate
  modified_base 12: mod_base = OTHER; note = 2'-O-methylguanosine-3'-phosphate
  modified_base 13: mod_base = OTHER; note = 2'-O-methyluridine-3'-phosphate
  modified_base 14: mod_base = OTHER; note = 2'-O-methyladenosine-3'-phosphate
  modified_base 15: mod_base = OTHER; note = 2'-O-methyladenosine-3'-phosphate
  modified_base 16: mod_base = OTHER; note = 2'-O-methylcytidine-3'-phosphate
  modified_base 17: mod_base = OTHER; note = 2'-O-methylcytidine-3'-phosphate
  modified_base 18: mod_base = OTHER; note = 2'-O-methyladenosine-3'-phosphate
  modified_base 19: mod_base = OTHER; note = 2'-O-methyladenosine-3'-phosphate
  modified_base 20: mod_base = OTHER; note = 2'-O-methylguanosine-3'-phosphate
  modified_base 21: mod_base = OTHER; note = 2'-O-methyladenosine-3'-phosphate ((2S,4R)-1-[29-[[2-(acetylamino)-2-deoxy-beta-D-galactopyra nosyl]oxy]-14,14-bis[[3-[[3-[[5-[[2-(acetylamino)-2-deoxy-b eta-D-galactopyranosyl]oxy]-1-oxopentyl]amino]propyl]amino] -3-oxopropoxy]methyl]-1,12,19,25-tetraoxo-16-oxa-13,20,24-t riazanonacos-1-yl]-4-hydroxy-2-pyrrolidinyl)methyl ester
tgggatttcatgtaaccaaga

SEQ ID NO: 55 - DNA, 21 bp, synthetic construct
  source 1..21: mol_type = other DNA
  modified_base 1: mod_base = OTHER; note = 2'-O-methyluridine-3'-phosphorothioate
  modified_base 2: mod_base = OTHER; note = 2'-O-methylguanosine-3'-phosphorothioate
  modified_base 3: mod_base = OTHER; note = 2'-O-methylguanosine-3'-phosphate
  modified_base 4: mod_base = OTHER; note = 2'-O-methylguanosine-3'-phosphate
  modified_base 5: mod_base = OTHER; note = 2'-O-methyladenosine-3'-phosphate
  modified_base 6: mod_base = OTHER; note = 2'-O-methyluridine-3'-phosphate
  modified_base 7: mod_base = OTHER; note = 2'-O-methyluridine-3'-phosphate
  modified_base 8: mod_base = OTHER; note = 2'-O-methyluridine-3'-phosphate
  modified_base 9: mod_base = OTHER; note = 2'-O-methylcytidine-3'-phosphate
  modified_base 10: mod_base = OTHER; note = 2'-O-methyladenosine-3'-phosphate
  modified_base 12: mod_base = OTHER; note = 2'-O-methylguanosine-3'-phosphate
  modified_base 13: mod_base = OTHER; note = 2'-O-methyluridine-3'-phosphate
  modified_base 14: mod_base = OTHER; note = 2'-O-methyladenosine-3'-phosphate
  modified_base 15: mod_base = OTHER; note = 2'-O-methyladenosine-3'-phosphate
  modified_base 16: mod_base = OTHER; note = 2'-O-methylcytidine-3'-phosphate
  modified_base 17: mod_base = OTHER; note = 2'-O-methyladenosine-3'-phosphate
  modified_base 18: mod_base = OTHER; note = 2'-O-methyladenosine-3'-phosphate
  modified_base 19: mod_base = OTHER; note = 2'-O-methyladenosine-3'-phosphate
  modified_base 20: mod_base = OTHER; note = 2'-O-methylguanosine-3'-phosphate
  modified_base 21: mod_base = OTHER; note = 2'-O-methyladenosine-3'-phosphate ((2S,4R)-1-[29-[[2-(acetylamino)-2-deoxy-beta-D-galactopyra nosyl]oxy]-14,14-bis[[3-[[3-[[5-[[2-(acetylamino)-2-deoxy-b eta-D-galactopyranosyl]oxy]-1-oxopentyl]amino]propyl]amino] -3-oxopropoxy]methyl]-1,12,19,25-tetraoxo-16-oxa-13,20,24-t riazanonacos-1-yl]-4-hydroxy-2-pyrrolidinyl)methyl ester
  misc_feature 1..10: note = RNA
  misc_feature 12..21: note = RNA
  misc_feature 11: note = DNA
tgggatttcatgtaacaaaga

SEQ ID NO: 56 - RNA, 21 nt, synthetic construct
  source 1..21: mol_type = other RNA
  modified_base 1: mod_base = OTHER; note = 2'-O-methyluridine-3'-phosphorothioate
  modified_base 2: mod_base = OTHER; note = 2'-O-methylguanosine-3'-phosphorothioate
  modified_base 3: mod_base = OTHER; note = 2'-O-methylguanosine-3'-phosphate
  modified_base 4: mod_base = OTHER; note = 2'-O-methylguanosine-3'-phosphate
  modified_base 5: mod_base = OTHER; note = 2'-O-methyladenosine-3'-phosphate
  modified_base 6: mod_base = OTHER; note = 2'-O-methyluridine-3'-phosphate
  modified_base 7: mod_base = OTHER; note = 2'-deoxy-2'-fluorouridine-3'-phosphate
  modified_base 8: mod_base = OTHER; note = 2'-O-methyluridine-3'-phosphate
  modified_base 9: mod_base = OTHER; note = 2'-deoxy-2'-fluorocytidine-3'-phosphate
  modified_base 10: mod_base = OTHER; note = 2'-deoxy-2'-fluoroadenosine-3'-phosphate
  modified_base 11: mod_base = OTHER; note = 2'-deoxy-2'-fluorouridine-3'-phosphate
  modified_base 12: mod_base = OTHER; note = 2'-O-methylguanosine-3'-phosphate
  modified_base 13: mod_base = OTHER; note = 2'-O-methyluridine-3'-phosphate
  modified_base 14: mod_base = OTHER; note = 2'-O-methyladenosine-3'-phosphate
  modified_base 15: mod_base = OTHER; note = 2'-O-methyladenosine-3'-phosphate
  modified_base 16: mod_base = OTHER; note = 2'-O-methylcytidine-3'-phosphate
  modified_base 17: mod_base = OTHER; note = 2'-O-methylcytidine-3'-phosphate
  modified_base 18: mod_base = OTHER; note = 2'-O-methyladenosine-3'-phosphate
  modified_base 19: mod_base = OTHER; note = 2'-O-methyladenosine-3'-phosphate
  modified_base 20: mod_base = OTHER; note = 2'-O-methylguanosine-3'-phosphate
  modified_base 21: mod_base = OTHER; note = 2'-O-methyladenosine-3'-phosphate ((2S,4R)-1-[29-[[2-(acetylamino)-2-deoxy-beta-D-galactopyra nosyl]oxy]-14,14-bis[[3-[[3-[[5-[[2-(acetylamino)-2-deoxy-b eta-D-galactopyranosyl]oxy]-1-oxopentyl]amino]propyl]amino] -3-oxopropoxy]methyl]-1,12,19,25-tetraoxo-16-oxa-13,20,24-t riazanonacos-1-yl]-4-hydroxy-2-pyrrolidinyl)methyl ester
tgggatttcatgtaaccaaga

SEQ ID NO: 57 - DNA, 21 bp, synthetic construct
  source 1..21: mol_type = other DNA
  modified_base 1: mod_base = OTHER; note = 2'-O-methyluridine-3'-phosphorothioate
  modified_base 2: mod_base = OTHER; note = 2'-O-methylguanosine-3'-phosphate
  modified_base 3: mod_base = OTHER; note = 2'-O-methylguanosine-3'-phosphate
  modified_base 4: mod_base = OTHER; note = 2'-O-methylguanosine-3'-phosphate
  modified_base 5: mod_base = OTHER; note = 2'-O-methyladenosine-3'-phosphate
  modified_base 6: mod_base = OTHER; note = 2'-O-methyluridine-3'-phosphate
  modified_base 7: mod_base = OTHER; note = 2'-O-methyluridine-3'-phosphate
  modified_base 8: mod_base = OTHER; note = 2'-O-methyluridine-3'-phosphate
  modified_base 9: mod_base = OTHER; note = 2'-O-methylcytidine-3'-phosphate
  modified_base 10: mod_base = OTHER; note = 2'-O-methyladenosine-3'-phosphate
  modified_base 12: mod_base = OTHER; note = 2'-O-methylguanosine-3'-phosphate
  modified_base 13: mod_base = OTHER; note = 2'-O-methyluridine-3'-phosphate
  modified_base 14: mod_base = OTHER; note = 2'-O-methyladenosine-3'-phosphate
  modified_base 15: mod_base = OTHER; note = 2'-O-methyladenosine-3'-phosphate
  modified_base 16: mod_base = OTHER; note = 2'-O-methylcytidine-3'-phosphate
  modified_base 17: mod_base = OTHER; note = 2'-O-methyladenosine-3'-phosphate
  modified_base 18: mod_base = OTHER; note = 2'-O-methyladenosine-3'-phosphate
  modified_base 19: mod_base = OTHER; note = 2'-O-methyladenosine-3'-phosphate
  modified_base 20: mod_base = OTHER; note = 2'-O-methylguanosine-3'-phosphate
  modified_base 21: mod_base = OTHER; note = 2'-O-methyladenosine-3'-phosphate ((2S,4R)-1-[29-[[2-(acetylamino)-2-deoxy-beta-D-galactopyra nosyl]oxy]-14,14-bis[[3-[[3-[[5-[[2-(acetylamino)-2-deoxy-b eta-D-galactopyranosyl]oxy]-1-oxopentyl]amino]propyl]amino] -3-oxopropoxy]methyl]-1,12,19,25-tetraoxo-16-oxa-13,20,24-t riazanonacos-1-yl]-4-hydroxy-2-pyrrolidinyl)methyl ester
  misc_feature 1..10: note = RNA
  misc_feature 12..21: note = RNA
  misc_feature 11: note = DNA
tgggatttcatgtaacaaaga

SEQ ID NO: 58 - RNA, 21 nt, synthetic construct
  source 1..21: mol_type = other RNA
  modified_base 1: mod_base = OTHER; note = 2'-O-methyluridine-3'-phosphorothioate
  modified_base 2: mod_base = OTHER; note = 2'-O-methylguanosine-3'-phosphorothioate
  modified_base 3: mod_base = OTHER; note = 2'-O-methylguanosine-3'-phosphate
  modified_base 4: mod_base = OTHER; note = 2'-O-methylguanosine-3'-phosphate
  modified_base 5: mod_base = OTHER; note = 2'-O-methyladenosine-3'-phosphate
  modified_base 6: mod_base = OTHER; note = 2'-O-methyluridine-3'-phosphate
  modified_base 7: mod_base = OTHER; note = 2'-deoxy-2'-fluorouridine-3'-phosphate
  modified_base 8: mod_base = OTHER; note = 2'-O-methyluridine-3'-phosphate
  modified_base 9: mod_base = OTHER; note = 2'-deoxy-2'-fluorocytidine-3'-phosphate
  modified_base 10: mod_base = OTHER; note = 2'-deoxy-2'-fluoroadenosine-3'-phosphate
  modified_base 11: mod_base = OTHER; note = 2'-deoxy-2'-fluorouridine-3'-phosphate
  modified_base 12: mod_base = OTHER; note = 2'-O-methylguanosine-3'-phosphate
  modified_base 13: mod_base = OTHER; note = 2'-O-methyluridine-3'-phosphate
  modified_base 14: mod_base = OTHER; note = 2'-O-methyladenosine-3'-phosphate
  modified_base 15: mod_base = OTHER; note = 2'-O-methyladenosine-3'-phosphate
  modified_base 16: mod_base = OTHER; note = 2'-deoxy-2'-fluorocytidine-3'-phosphate
  modified_base 17: mod_base = OTHER; note = 2'-O-methylcytidine-3'-phosphate
  modified_base 18: mod_base = OTHER; note = 2'-O-methyladenosine-3'-phosphate
  modified_base 19: mod_base = OTHER; note = 2'-O-methyladenosine-3'-phosphate
  modified_base 20: mod_base = OTHER; note = 2'-O-methylguanosine-3'-phosphate
  modified_base 21: mod_base = OTHER; note = 2'-O-methyladenosine-3'-phosphate ((2S,4R)-1-[29-[[2-(acetylamino)-2-deoxy-beta-D-galactopyra nosyl]oxy]-14,14-bis[[3-[[3-[[5-[[2-(acetylamino)-2-deoxy-b eta-D-galactopyranosyl]oxy]-1-oxopentyl]amino]propyl]amino] -3-oxopropoxy]methyl]-1,12,19,25-tetraoxo-16-oxa-13,20,24-t riazanonacos-1-yl]-4-hydroxy-2-pyrrolidinyl)methyl ester
tgggatttcatgtaaccaaga

SEQ ID NO: 59 - RNA, 21 nt, synthetic construct
  source 1..21: mol_type = other RNA
  modified_base 1: mod_base = OTHER; note = 2'-O-methyluridine-3'-phosphorothioate
  modified_base 2: mod_base = OTHER; note = 2'-O-methyladenosine-3'-phosphorothioate
  modified_base 3: mod_base = OTHER; note = 2'-O-methylguanosine-3'-phosphate
  modified_base 4: mod_base = OTHER; note = 2'-O-methylguanosine-3'-phosphate
  modified_base 5: mod_base = OTHER; note = 2'-O-methyladenosine-3'-phosphate
  modified_base 6: mod_base = OTHER; note = 2'-O-methyluridine-3'-phosphate
  modified_base 7: mod_base = OTHER; note = 2'-deoxy-2'-fluorouridine-3'-phosphate
  modified_base 8: mod_base = OTHER; note = 2'-O-methyluridine-3'-phosphate
  modified_base 9: mod_base = OTHER; note = 2'-deoxy-2'-fluorocytidine-3'-phosphate
  modified_base 10: mod_base = OTHER; note = 2'-deoxy-2'-fluoroadenosine-3'-phosphate
  modified_base 11: mod_base = OTHER; note = 2'-deoxy-2'-fluorouridine-3'-phosphate
  modified_base 12: mod_base = OTHER; note = 2'-O-methylguanosine-3'-phosphate
  modified_base 13: mod_base = OTHER; note = 2'-O-methyluridine-3'-phosphate
  modified_base 14: mod_base = OTHER; note = 2'-O-methyladenosine-3'-phosphate
  modified_base 15: mod_base = OTHER; note = 2'-O-methyladenosine-3'-phosphate
  modified_base 16: mod_base = OTHER; note = 2'-O-methylcytidine-3'-phosphate
  modified_base 17: mod_base = OTHER; note = 2'-O-methylcytidine-3'-phosphate
  modified_base 18: mod_base = OTHER; note = 2'-O-methyladenosine-3'-phosphate
  modified_base 19: mod_base = OTHER; note = 2'-O-methyladenosine-3'-phosphate
  modified_base 20: mod_base = OTHER; note = 2'-O-methylguanosine-3'-phosphate
  modified_base 21: mod_base = OTHER; note = 2'-O-methyladenosine-3'-phosphate ((2S,4R)-1-[29-[[2-(acetylamino)-2-deoxy-beta-D-galactopyra nosyl]oxy]-14,14-bis[[3-[[3-[[5-[[2-(acetylamino)-2-deoxy-b eta-D-galactopyranosyl]oxy]-1-oxopentyl]amino]propyl]amino] -3-oxopropoxy]methyl]-1,12,19,25-tetraoxo-16-oxa-13,20,24-t riazanonacos-1-yl]-4-hydroxy-2-pyrrolidinyl)methyl ester
taggatttcatgtaaccaaga

SEQ ID NO: 60 - RNA, 21 nt, synthetic construct
  source 1..21: mol_type = other RNA
  modified_base 1: mod_base = OTHER; note = 2'-O-methyluridine-3'-phosphorothioate
  modified_base 2: mod_base = OTHER; note = 2'-O-methylguanosine-3'-phosphorothioate
  modified_base 3: mod_base = OTHER; note = 2'-O-methylguanosine-3'-phosphate
  modified_base 4: mod_base = OTHER; note = 2'-O-methylguanosine-3'-phosphate
  modified_base 5: mod_base = OTHER; note = 2'-O-methyladenosine-3'-phosphate
  modified_base 6: mod_base = OTHER; note = 2'-O-methyluridine-3'-phosphate
  modified_base 7: mod_base = OTHER; note = 2'-deoxy-2'-fluorouridine-3'-phosphate
  modified_base 8: mod_base = OTHER; note = 2'-O-methyluridine-3'-phosphate
  modified_base 9: mod_base = OTHER; note = 2'-deoxy-2'-fluorocytidine-3'-phosphate
  modified_base 10: mod_base = OTHER; note = 2'-deoxy-2'-fluoroadenosine-3'-phosphate
  modified_base 11: mod_base = OTHER; note = 2'-deoxy-2'-fluorouridine-3'-phosphate
  modified_base 12: mod_base = OTHER; note = 2'-O-methylguanosine-3'-phosphate
  modified_base 13: mod_base = OTHER; note = 2'-O-methyluridine-3'-phosphate
  modified_base 14: mod_base = OTHER; note = 2'-O-methyladenosine-3'-phosphate
  modified_base 15: mod_base = OTHER; note = 2'-O-methyladenosine-3'-phosphate
  modified_base 16: mod_base = OTHER; note = 2'-O-methylcytidine-3'-phosphate
  modified_base 17: mod_base = OTHER; note = 2'-O-methylcytidine-3'-phosphate
  modified_base 18: mod_base = OTHER; note = 2'-O-methyladenosine-3'-phosphate
  modified_base 19: mod_base = OTHER; note = 2'-O-methyladenosine-3'-phosphate
  modified_base 20: mod_base = OTHER; note = 2'-O-methylguanosine-3'-phosphate
  modified_base 21: mod_base = OTHER; note = 2'-O-methyladenosine-3'-phosphate ((2S,4R)-1-[29-[[2-(acetylamino)-2-deoxy-beta-D-galactopyra nosyl]oxy]-14,14-bis[[3-[[3-[[5-[[2-(acetylamino)-2-deoxy-b eta-D-galactopyranosyl]oxy]-1-oxopentyl]amino]propyl]amino] -3-oxopropoxy]methyl]-1,12,19,25-tetraoxo-16-oxa-13,20,24-t riazanonacos-1-yl]-4-hydroxy-2-pyrrolidinyl)methyl ester
tgggatttcatgtaaccaaga

SEQ ID NO: 61 - RNA, 21 nt, synthetic construct
  source 1..21: mol_type = other RNA
  modified_base 1: mod_base = OTHER; note = 2'-O-methyluridine-3'-phosphorothioate
  modified_base 2: mod_base = OTHER; note = 2'-O-methylguanosine-3'-phosphorothioate
  modified_base 3: mod_base = OTHER; note = 2'-O-methylguanosine-3'-phosphate
  modified_base 4: mod_base = OTHER; note = 2'-O-methylguanosine-3'-phosphate
  modified_base 5: mod_base = OTHER; note = 2'-deoxy-2'-fluoroadenosine-3'-phosphate
  modified_base 6: mod_base = OTHER; note = 2'-O-methyluridine-3'-phosphate
  modified_base 7: mod_base = OTHER; note = 2'-deoxy-2'-fluorouridine-3'-phosphate
  modified_base 8: mod_base = OTHER; note = 2'-O-methyluridine-3'-phosphate
  modified_base 9: mod_base = OTHER; note = 2'-deoxy-2'-fluorocytidine-3'-phosphate
  modified_base 10: mod_base = OTHER; note = 2'-deoxy-2'-fluoroadenosine-3'-phosphate
  modified_base 11: mod_base = OTHER; note = 2'-deoxy-2'-fluorouridine-3'-phosphate
  modified_base 12: mod_base = OTHER; note = 2'-O-methylguanosine-3'-phosphate
  modified_base 13: mod_base = OTHER; note = 2'-deoxy-2'-fluorouridine-3'-phosphate
  modified_base 14: mod_base = OTHER; note = 2'-O-methyladenosine-3'-phosphate
  modified_base 15: mod_base = OTHER; note = 2'-O-methyladenosine-3'-phosphate
  modified_base 16: mod_base = OTHER; note = 2'-O-methylcytidine-3'-phosphate
  modified_base 17: mod_base = OTHER; note = 2'-O-methylcytidine-3'-phosphate
  modified_base 18: mod_base = OTHER; note = 2'-O-methyladenosine-3'-phosphate
  modified_base 19: mod_base = OTHER; note = 2'-O-methyladenosine-3'-phosphate
  modified_base 20: mod_base = OTHER; note = 2'-O-methylguanosine-3'-phosphate
  modified_base 21: mod_base = OTHER; note = 2'-deoxy-2'-fluoroadenosine-3'-phosphate ((2S,4R)-1-[29-[[2-(acetylamino)-2-deoxy-beta-D-galactopyra nosyl]oxy]-14,14-bis[[3-[[3-[[5-[[2-(acetylamino)-2-deoxy-b eta-D-galactopyranosyl]oxy]-1-oxopentyl]amino]propyl]amino] -3-oxopropoxy]methyl]-1,12,19,25-tetraoxo-16-oxa-13,20,24-t riazanonacos-1-yl]-4-hydroxy-2-pyrrolidinyl)methyl ester
tgggatttcatgtaaccaaga

SEQ ID NO: 62 - DNA, 21 bp, synthetic construct
  source 1..21: mol_type = other DNA
  modified_base 1: mod_base = OTHER; note = 2'-O-methyluridine-3'-phosphorothioate
  modified_base 2: mod_base = OTHER; note = 2'-O-methylguanosine-3'-phosphorothioate
  modified_base 3: mod_base = OTHER; note = 2'-O-methylguanosine-3'-phosphate
  modified_base 4: mod_base = OTHER; note = 2'-O-methylguanosine-3'-phosphate
  modified_base 5: mod_base = OTHER; note = 2'-O-methyladenosine-3'-phosphate
  modified_base 6: mod_base = OTHER; note = 2'-O-methyluridine-3'-phosphate
  modified_base 7: mod_base = OTHER; note = 2'-O-methyluridine-3'-phosphate
  modified_base 8: mod_base = OTHER; note = 2'-O-methyluridine-3'-phosphate
  modified_base 9: mod_base = OTHER; note = 2'-O-methylcytidine-3'-phosphate
  modified_base 10: mod_base = OTHER; note = 2'-O-methyladenosine-3'-phosphate
  modified_base 12: mod_base = OTHER; note = 2'-O-methylguanosine-3'-phosphate
  modified_base 13: mod_base = OTHER; note = 2'-O-methyluridine-3'-phosphate
  modified_base 14: mod_base = OTHER; note = 2'-O-methyladenosine-3'-phosphate
  modified_base 15: mod_base = OTHER; note = 2'-O-methyladenosine-3'-phosphate
  modified_base 16: mod_base = OTHER; note = 2'-O-methylcytidine-3'-phosphate
  modified_base 17: mod_base = OTHER; note = 2'-O-methyladenosine-3'-phosphate
  modified_base 18: mod_base = OTHER; note = 2'-O-methyladenosine-3'-phosphate
  modified_base 19: mod_base = OTHER; note = 2'-O-methyladenosine-3'-phosphate
  modified_base 20: mod_base = OTHER; note = 2'-O-methylguanosine-3'-phosphate
  modified_base 21: mod_base = OTHER; note = 2'-O-methyladenosine-3'-phosphate ((2S,4R)-1-[29-[[2-(acetylamino)-2-deoxy-beta-D-galactopyra nosyl]oxy]-14,14-bis[[3-[[3-[[5-[[2-(acetylamino)-2-deoxy-b eta-D-galactopyranosyl]oxy]-1-oxopentyl]amino]propyl]amino] -3-oxopropoxy]methyl]-1,12,19,25-tetraoxo-16-oxa-13,20,24-t riazanonacos-1-yl]-4-hydroxy-2-pyrrolidinyl)methyl ester
  misc_feature 1..10: note = RNA
  misc_feature 12..21: note = RNA
  misc_feature 11: note = DNA
tgggatttcatgtaacaaaga

SEQ ID NO: 63 - RNA, 19 nt, synthetic construct
  source 1..19: mol_type = other RNA
  modified_base 1: mod_base = OTHER; note = 2'-O-methylguanosine-3'-phosphorothioate
  modified_base 2: mod_base = OTHER; note = 2'-O-methylguanosine-3'-phosphorothioate
  modified_base 3: mod_base = OTHER; note = 2'-O-methyladenosine-3'-phosphate
  modified_base 4: mod_base = OTHER; note = 2'-O-methyluridine-3'-phosphate
  modified_base 5: mod_base = OTHER; note = 2'-deoxy-2'-fluorouridine-3'-phosphate
  modified_base 6: mod_base = OTHER; note = 2'-O-methyluridine-3'-phosphate
  modified_base 7: mod_base = OTHER; note = 2'-deoxy-2'-fluorocytidine-3'-phosphate
  modified_base 8: mod_base = OTHER; note = 2'-deoxy-2'-fluoroadenosine-3'-phosphate
  modified_base 9: mod_base = OTHER; note = 2'-deoxy-2'-fluorouridine-3'-phosphate
  modified_base 10: mod_base = OTHER; note = 2'-O-methylguanosine-3'-phosphate
  modified_base 11: mod_base = OTHER; note = 2'-O-methyluridine-3'-phosphate
  modified_base 12: mod_base = OTHER; note = 2'-O-methyladenosine-3'-phosphate
  modified_base 13: mod_base = OTHER; note = 2'-O-methyladenosine-3'-phosphate
  modified_base 14: mod_base = OTHER; note = 2'-O-methylcytidine-3'-phosphate
  modified_base 15: mod_base = OTHER; note = 2'-O-methylcytidine-3'-phosphate
  modified_base 16: mod_base = OTHER; note = 2'-O-methyladenosine-3'-phosphate
  modified_base 17: mod_base = OTHER; note = 2'-O-methyladenosine-3'-phosphate
  modified_base 18: mod_base = OTHER; note = 2'-O-methylguanosine-3'-phosphate
  modified_base 19: mod_base = OTHER; note = 2'-O-methyladenosine-3'-phosphate ((2S,4R)-1-[29-[[2-(acetylamino)-2-deoxy-beta-D-galactopyra nosyl]oxy]-14,14-bis[[3-[[3-[[5-[[2-(acetylamino)-2-deoxy-b eta-D-galactopyranosyl]oxy]-1-oxopentyl]amino]propyl]amino] -3-oxopropoxy]methyl]-1,12,19,25-tetraoxo-16-oxa-13,20,24-t riazanonacos-1-yl]-4-hydroxy-2-pyrrolidinyl)methyl ester
ggatttcatgtaaccaaga

SEQ ID NO: 64 - RNA, 21 nt, synthetic construct
  source 1..21: mol_type = other RNA
  modified_base 1: mod_base = OTHER; note = 2'-O-methyluridine-3'-phosphorothioate
  modified_base 2: mod_base = OTHER; note = 2'-O-methylguanosine-3'-phosphorothioate
  modified_base 3: mod_base = OTHER; note = 2'-O-methylguanosine-3'-phosphate
  modified_base 4: mod_base = OTHER; note = 2'-O-methylguanosine-3'-phosphate
  modified_base 5: mod_base = OTHER; note = 2'-O-methyladenosine-3'-phosphate
  modified_base 6: mod_base = OTHER; note = 2'-O-methyluridine-3'-phosphate
  modified_base 7: mod_base = OTHER; note = 2'-deoxy-2'-fluorouridine-3'-phosphate
  modified_base 8: mod_base = OTHER; note = 2'-O-methyluridine-3'-phosphate
  modified_base 9: mod_base = OTHER; note = 2'-deoxy-2'-fluorocytidine-3'-phosphate
  modified_base 10: mod_base = OTHER; note = 2'-deoxy-2'-fluoroadenosine-3'-phosphate
  modified_base 11: mod_base = OTHER; note = 2'-deoxy-2'-fluorouridine-3'-phosphate
  modified_base 12: mod_base = OTHER; note = 2'-O-methylguanosine-3'-phosphate
  modified_base 13: mod_base = OTHER; note = 2'-O-methyluridine-3'-phosphate
  modified_base 14: mod_base = OTHER; note = 2'-O-methyladenosine-3'-phosphate
  modified_base 15: mod_base = OTHER; note = 2'-O-methyladenosine-3'-phosphate
  modified_base 16: mod_base = OTHER; note = 2'-O-methylcytidine-3'-phosphate
  modified_base 17: mod_base = OTHER; note = 2'-O-methylcytidine-3'-phosphate
  modified_base 18: mod_base = OTHER; note = 2'-O-methyladenosine-3'-phosphate
  modified_base 19: mod_base = OTHER; note = 2'-O-methyladenosine-3'-phosphate
  modified_base 20: mod_base = OTHER; note = 2'-O-methylguanosine-3'-phosphate
  modified_base 21: mod_base = OTHER; note = 2'-O-methyladenosine-3'-phosphate ((2S,4R)-1-[29-[[2-(acetylamino)-2-deoxy-beta-D-galactopyra nosyl]oxy]-14,14-bis[[3-[[3-[[5-[[2-(acetylamino)-2-deoxy-b eta-D-galactopyranosyl]oxy]-1-oxopentyl]amino]propyl]amino] -3-oxopropoxy]methyl]-1,12,19,25-tetraoxo-16-oxa-13,20,24-t riazanonacos-1-yl]-4-hydroxy-2-pyrrolidinyl)methyl ester
tgggatttcatgtaaccaaga

SEQ ID NO: 65 - RNA, 21 nt, synthetic construct
  source 1..21: mol_type = other RNA
  modified_base 1: mod_base = OTHER; note = 2'-O-methyluridine-3'-phosphorothioate
  modified_base 2: mod_base = OTHER; note = 2'-O-methylguanosine-3'-phosphate
  modified_base 3: mod_base = OTHER; note = 2'-O-methylguanosine-3'-phosphate
  modified_base 4: mod_base = OTHER; note = 2'-O-methylguanosine-3'-phosphate
  modified_base 5: mod_base = OTHER; note = 2'-O-methyladenosine-3'-phosphate
  modified_base 6: mod_base = OTHER; note = 2'-O-methyluridine-3'-phosphate
  modified_base 7: mod_base = OTHER; note = 2'-deoxy-2'-fluorouridine-3'-phosphate
  modified_base 8: mod_base = OTHER; note = 2'-O-methyluridine-3'-phosphate
  modified_base 9: mod_base = OTHER; note = 2'-deoxy-2'-fluorocytidine-3'-phosphate
  modified_base 10: mod_base = OTHER; note = 2'-deoxy-2'-fluoroadenosine-3'-phosphate
  modified_base 11: mod_base = OTHER; note = 2'-deoxy-2'-fluorouridine-3'-phosphate
  modified_base 12: mod_base = OTHER; note = 2'-O-methylguanosine-3'-phosphate
  modified_base 13: mod_base = OTHER; note = 2'-O-methyluridine-3'-phosphate
  modified_base 14: mod_base = OTHER; note = 2'-O-methyladenosine-3'-phosphate
  modified_base 15: mod_base = OTHER; note = 2'-O-methyladenosine-3'-phosphate
  modified_base 16: mod_base = OTHER; note = 2'-O-methylcytidine-3'-phosphate
  modified_base 17: mod_base = OTHER; note = 2'-O-methylcytidine-3'-phosphate
  modified_base 18: mod_base = OTHER; note = 2'-O-methyladenosine-3'-phosphate
  modified_base 19: mod_base = OTHER; note = 2'-O-methyladenosine-3'-phosphate
  modified_base 20: mod_base = OTHER; note = 2'-O-methylguanosine-3'-phosphate
  modified_base 21: mod_base = OTHER; note = 2'-O-methyladenosine-3'-phosphate ((2S,4R)-1-[29-[[2-(acetylamino)-2-deoxy-beta-D-galactopyra nosyl]oxy]-14,14-bis[[3-[[3-[[5-[[2-(acetylamino)-2-deoxy-b eta-D-galactopyranosyl]oxy]-1-oxopentyl]amino]propyl]amino] -3-oxopropoxy]methyl]-1,12,19,25-tetraoxo-16-oxa-13,20,24-t riazanonacos-1-yl]-4-hydroxy-2-pyrrolidinyl)methyl ester
tgggatttcatgtaaccaaga

SEQ ID NO: 66 - RNA, 21 nt, synthetic construct
  source 1..21: mol_type = other RNA
  modified_base 1: mod_base = OTHER; note = 2'-O-methyluridine-3'-phosphorothioate
  modified_base 2: mod_base = OTHER; note = 2'-O-methylguanosine-3'-phosphate
  modified_base 3: mod_base = OTHER; note = 2'-O-methylguanosine-3'-phosphate
  modified_base 4: mod_base = OTHER; note = 2'-O-methylguanosine-3'-phosphate
  modified_base 5: mod_base = OTHER; note = 2'-O-methyladenosine-3'-phosphate
  modified_base 6: mod_base = OTHER; note = 2'-O-methyluridine-3'-phosphate
  modified_base 7: mod_base = OTHER; note = 2'-deoxy-2'-fluorouridine-3'-phosphate
  modified_base 8: mod_base = OTHER; note = 2'-O-methyluridine-3'-phosphate
  modified_base 9: mod_base = OTHER; note = 2'-deoxy-2'-fluorocytidine-3'-phosphate
  modified_base 10: mod_base = OTHER; note = 2'-deoxy-2'-fluoroadenosine-3'-phosphate
  modified_base 11: mod_base = OTHER; note = 2'-deoxy-2'-fluorouridine-3'-phosphate
  modified_base 12: mod_base = OTHER; note = 2'-O-methylguanosine-3'-phosphate
  modified_base 13: mod_base = OTHER; note = 2'-O-methyluridine-3'-phosphate
  modified_base 14: mod_base = OTHER; note = 2'-O-methyladenosine-3'-phosphate
  modified_base 15: mod_base = OTHER; note = 2'-O-methyladenosine-3'-phosphate
  modified_base 16: mod_base = OTHER; note = 2'-O-methylcytidine-3'-phosphate
  modified_base 17: mod_base = OTHER; note = 2'-O-methylcytidine-3'-phosphate
  modified_base 18: mod_base = OTHER; note = 2'-O-methyladenosine-3'-phosphate
  modified_base 19: mod_base = OTHER; note = 2'-O-methyladenosine-3'-phosphate
  modified_base 20: mod_base = OTHER; note = 2'-O-methylguanosine-3'-phosphate
  modified_base 21: mod_base = OTHER; note = 2'-O-methyladenosine-3'-phosphate ((2S,4R)-1-[29-[[2-(acetylamino)-2-deoxy-beta-D-galactopyra nosyl]oxy]-14,14-bis[[3-[[3-[[5-[[2-(acetylamino)-2-deoxy-b eta-D-galactopyranosyl]oxy]-1-oxopentyl]amino]propyl]amino] -3-oxopropoxy]methyl]-1,12,19,25-tetraoxo-16-oxa-13,20,24-t riazanonacos-1-yl]-4-hydroxy-2-pyrrolidinyl)methyl ester
tgggatttcatgtaaccaaga

SEQ ID NO: 67 - RNA, 21 nt, synthetic construct
  source 1..21: mol_type = other RNA
  modified_base 1: mod_base = OTHER; note = 2'-O-methyluridine-3'-phosphorothioate
  modified_base 2: mod_base = OTHER; note = 2'-O-methylguanosine-3'-phosphorothioate
  modified_base 3: mod_base = OTHER; note = 2'-O-methylguanosine-3'-phosphate
  modified_base 4: mod_base = OTHER; note = 2'-O-methylguanosine-3'-phosphate
  modified_base 5: mod_base = OTHER; note = 2'-O-methyladenosine-3'-phosphate
  modified_base 6: mod_base = OTHER; note = 2'-O-methyluridine-3'-phosphate
  modified_base 7: mod_base = OTHER; note = 2'-deoxy-2'-fluorouridine-3'-phosphate
  modified_base 8: mod_base = OTHER; note = 2'-O-methyluridine-3'-phosphate
  modified_base 9: mod_base = OTHER; note = 2'-deoxy-2'-fluorocytidine-3'-phosphate
  modified_base 10: mod_base = OTHER; note = 2'-deoxy-2'-fluoroadenosine-3'-phosphate
  modified_base 11: mod_base = OTHER; note = 2'-deoxy-2'-fluorouridine-3'-phosphate
  modified_base 12: mod_base = OTHER; note = 2'-O-methylguanosine-3'-phosphate
  modified_base 13: mod_base = OTHER; note = 2'-O-methyluridine-3'-phosphate
  modified_base 14: mod_base = OTHER; note = 2'-O-methyladenosine-3'-phosphate
  modified_base 15: mod_base = OTHER; note = 2'-O-methyladenosine-3'-phosphate
  modified_base 16: mod_base = OTHER; note = 2'-deoxy-2'-fluorocytidine-3'-phosphate
  modified_base 17: mod_base = OTHER; note = 2'-O-methylcytidine-3'-phosphate
  modified_base 18: mod_base = OTHER; note = 2'-O-methyladenosine-3'-phosphate
  modified_base 19: mod_base = OTHER; note = 2'-O-methyladenosine-3'-phosphate
  modified_base 20: mod_base = OTHER; note = 2'-O-methylguanosine-3'-phosphate
  modified_base 21: mod_base = OTHER; note = 2'-O-methyladenosine-3'-phosphate ((2S,4R)-1-[29-[[2-(acetylamino)-2-deoxy-beta-D-galactopyra nosyl]oxy]-14,14-bis[[3-[[3-[[5-[[2-(acetylamino)-2-deoxy-b eta-D-galactopyranosyl]oxy]-1-oxopentyl]amino]propyl]amino] -3-oxopropoxy]methyl]-1,12,19,25-tetraoxo-16-oxa-13,20,24-t riazanonacos-1-yl]-4-hydroxy-2-pyrrolidinyl)methyl ester
tgggatttcatgtaaccaaga

SEQ ID NO: 68 - RNA, 19 nt, synthetic construct
  source 1..19: mol_type = other RNA
  modified_base 1: mod_base = OTHER; note = 2'-O-methylguanosine-3'-phosphorothioate
  modified_base 2: mod_base = OTHER; note = 2'-O-methylguanosine-3'-phosphorothioate
  modified_base 3: mod_base = OTHER; note = 2'-O-methyladenosine-3'-phosphate
  modified_base 4: mod_base = OTHER; note = 2'-O-methyluridine-3'-phosphate
  modified_base 5: mod_base = OTHER; note = 2'-deoxy-2'-fluorouridine-3'-phosphate
  modified_base 6: mod_base = OTHER; note = 2'-O-methyluridine-3'-phosphate
  modified_base 7: mod_base = OTHER; note = 2'-deoxy-2'-fluorocytidine-3'-phosphate
  modified_base 8: mod_base = OTHER; note = 2'-deoxy-2'-fluoroadenosine-3'-phosphate
  modified_base 9: mod_base = OTHER; note = 2'-deoxy-2'-fluorouridine-3'-phosphate
  modified_base 10: mod_base = OTHER; note = 2'-O-methylguanosine-3'-phosphate
  modified_base 11: mod_base = OTHER; note = 2'-O-methyluridine-3'-phosphate
  modified_base 12: mod_base = OTHER; note = 2'-O-methyladenosine-3'-phosphate
  modified_base 13: mod_base = OTHER; note = 2'-O-methyladenosine-3'-phosphate
  modified_base 14: mod_base = OTHER; note = 2'-O-methylcytidine-3'-phosphate
  modified_base 15: mod_base = OTHER; note = 2'-O-methylcytidine-3'-phosphate
  modified_base 16: mod_base = OTHER; note = 2'-O-methyladenosine-3'-phosphate
  modified_base 17: mod_base = OTHER; note = 2'-O-methyladenosine-3'-phosphate
  modified_base 18: mod_base = OTHER; note = 2'-O-methylguanosine-3'-phosphate
  modified_base 19: mod_base = OTHER; note = 2'-O-methyladenosine-3'-phosphate ((2S,4R)-1-[29-[[2-(acetylamino)-2-deoxy-beta-D-galactopyra nosyl]oxy]-14,14-bis[[3-[[3-[[5-[[2-(acetylamino)-2-deoxy-b eta-D-galactopyranosyl]oxy]-1-oxopentyl]amino]propyl]amino] -3-oxopropoxy]methyl]-1,12,19,25-tetraoxo-16-oxa-13,20,24-t riazanonacos-1-yl]-4-hydroxy-2-pyrrolidinyl)methyl ester
ggatttcatgtaaccaaga

SEQ ID NO: 69 - RNA, 19 nt, synthetic construct
  source 1..19: mol_type = other RNA
  modified_base 1: mod_base = OTHER; note = 2'-O-methylguanosine-3'-phosphorothioate
  modified_base 2: mod_base = OTHER; note = 2'-O-methylguanosine-3'-phosphate
  modified_base 3: mod_base = OTHER; note = 2'-O-methyladenosine-3'-phosphate
  modified_base 4: mod_base = OTHER; note = 2'-O-methyluridine-3'-phosphate
  modified_base 5: mod_base = OTHER; note = 2'-deoxy-2'-fluorouridine-3'-phosphate
  modified_base 6: mod_base = OTHER; note = 2'-O-methyluridine-3'-phosphate
  modified_base 7: mod_base = OTHER; note = 2'-deoxy-2'-fluorocytidine-3'-phosphate
  modified_base 8: mod_base = OTHER; note = 2'-deoxy-2'-fluoroadenosine-3'-phosphate
  modified_base 9: mod_base = OTHER; note = 2'-deoxy-2'-fluorouridine-3'-phosphate
  modified_base 10: mod_base = OTHER; note = 2'-O-methylguanosine-3'-phosphate
  modified_base 11: mod_base = OTHER; note = 2'-O-methyluridine-3'-phosphate
  modified_base 12: mod_base = OTHER; note = 2'-O-methyladenosine-3'-phosphate
  modified_base 13: mod_base = OTHER; note = 2'-O-methyladenosine-3'-phosphate
  modified_base 14: mod_base = OTHER; note = 2'-O-methylcytidine-3'-phosphate
  modified_base 15: mod_base = OTHER; note = 2'-O-methylcytidine-3'-phosphate
  modified_base 16: mod_base = OTHER; note = 2'-O-methyladenosine-3'-phosphate
  modified_base 17: mod_base = OTHER; note = 2'-O-methyladenosine-3'-phosphate
  modified_base 18: mod_base = OTHER; note = 2'-O-methylguanosine-3'-phosphate
  modified_base 19: mod_base = OTHER; note = 2'-O-methyladenosine-3'-phosphate ((2S,4R)-1-[29-[[2-(acetylamino)-2-deoxy-beta-D-galactopyra nosyl]oxy]-14,14-bis[[3-[[3-[[5-[[2-(acetylamino)-2-deoxy-b eta-D-galactopyranosyl]oxy]-1-oxopentyl]amino]propyl]amino] -3-oxopropoxy]methyl]-1,12,19,25-tetraoxo-16-oxa-13,20,24-t riazanonacos-1-yl]-4-hydroxy-2-pyrrolidinyl)methyl ester
ggatttcatgtaaccaaga

SEQ ID NO: 70 - RNA, 21 nt, synthetic construct
  source 1..21: mol_type = other RNA
  modified_base 1: mod_base = OTHER; note = 2'-O-methyluridine-3'-phosphorothioate
  modified_base 2: mod_base = OTHER; note = 2'-O-methylguanosine-3'-phosphorothioate
  modified_base 3: mod_base = OTHER; note = 2'-O-methylguanosine-3'-phosphate
  modified_base 4: mod_base = OTHER; note = 2'-O-methylguanosine-3'-phosphate
  modified_base 5: mod_base = OTHER; note = 2'-O-methyladenosine-3'-phosphate
  modified_base 6: mod_base = OTHER; note = 2'-O-methyluridine-3'-phosphate
  modified_base 7: mod_base = OTHER; note = 2'-deoxy-2'-fluorouridine-3'-phosphate
  modified_base 8: mod_base = OTHER; note = 2'-O-methyluridine-3'-phosphate
  modified_base 9: mod_base = OTHER; note = 2'-deoxy-2'-fluorocytidine-3'-phosphate
  modified_base 10: mod_base = OTHER; note = 2'-deoxy-2'-fluoroadenosine-3'-phosphate
  modified_base 11: mod_base = OTHER; note = 2'-deoxy-2'-fluorouridine-3'-phosphate
  modified_base 12: mod_base = OTHER; note = 2'-O-methylguanosine-3'-phosphate
  modified_base 13: mod_base = OTHER; note = 2'-O-methyluridine-3'-phosphate
  modified_base 14: mod_base = OTHER; note = 2'-O-methyladenosine-3'-phosphate
  modified_base 15: mod_base = OTHER; note = 2'-O-methyladenosine-3'-phosphate
  modified_base 16: mod_base = OTHER; note = 2'-O-methylcytidine-3'-phosphate
  modified_base 17: mod_base = OTHER; note = 2'-O-methylcytidine-3'-phosphate
  modified_base 18: mod_base = OTHER; note = 2'-O-methyladenosine-3'-phosphate
  modified_base 19: mod_base = OTHER; note = 2'-O-methyladenosine-3'-phosphate
  modified_base 20: mod_base = OTHER; note = 2'-O-methylguanosine-3'-phosphate
  modified_base 21: mod_base = OTHER; note = 2'-O-methyladenosine-3'-phosphate ((2S,4R)-1-[29-[[2-(acetylamino)-2-deoxy-beta-D-galactopyra nosyl]oxy]-14,14-bis[[3-[[3-[[5-[[2-(acetylamino)-2-deoxy-b eta-D-galactopyranosyl]oxy]-1-oxopentyl]amino]propyl]amino] -3-oxopropoxy]methyl]-1,12,19,25-tetraoxo-16-oxa-13,20,24-t riazanonacos-1-yl]-4-hydroxy-2-pyrrolidinyl)methyl ester
tgggatttcatgtaaccaaga

SEQ ID NO: 71 - RNA, 19 nt, synthetic construct
  source 1..19: mol_type = other RNA
  modified_base 1: mod_base = OTHER; note = 2'-O-methylguanosine-3'-phosphorothioate
  modified_base 2: mod_base = OTHER; note = 2'-O-methylguanosine-3'-phosphorothioate
  modified_base 3: mod_base = OTHER; note = 2'-O-methyladenosine-3'-phosphate
  modified_base 4: mod_base = OTHER; note = 2'-O-methyluridine-3'-phosphate
  modified_base 5: mod_base = OTHER; note = 2'-O-methyluridine-3'-phosphate
  modified_base 6: mod_base = OTHER; note = 2'-O-methyluridine-3'-phosphate
  modified_base 7: mod_base = OTHER; note = 2'-O-methylcytidine-3'-phosphate
  modified_base 8: mod_base = OTHER; note = 2'-deoxy-2'-fluoroadenosine-3'-phosphate
  modified_base 9: mod_base = OTHER; note = 2'-deoxy-2'-fluorouridine-3'-phosphate
  modified_base 10: mod_base = OTHER; note = 2'-O-methylguanosine-3'-phosphate
  modified_base 11: mod_base = OTHER; note = 2'-O-methyluridine-3'-phosphate
  modified_base 12: mod_base = OTHER; note = 2'-O-methyladenosine-3'-phosphate
  modified_base 13: mod_base = OTHER; note = 2'-O-methyladenosine-3'-phosphate
  modified_base 14: mod_base = OTHER; note = 2'-O-methylcytidine-3'-phosphate
  modified_base 15: mod_base = OTHER; note = 2'-O-methylcytidine-3'-phosphate
  modified_base 16: mod_base = OTHER; note = 2'-O-methyladenosine-3'-phosphate
  modified_base 17: mod_base = OTHER; note = 2'-O-methyladenosine-3'-phosphate
  modified_base 18: mod_base = OTHER; note = 2'-O-methylguanosine-3'-phosphate
  modified_base 19: mod_base = OTHER; note = 2'-O-methyladenosine-3'-phosphate ((2S,4R)-1-[29-[[2-(acetylamino)-2-deoxy-beta-D-galactopyra nosyl]oxy]-14,14-bis[[3-[[3-[[5-[[2-(acetylamino)-2-deoxy-b eta-D-galactopyranosyl]oxy]-1-oxopentyl]amino]propyl]amino] -3-oxopropoxy]methyl]-1,12,19,25-tetraoxo-16-oxa-13,20,24-t riazanonacos-1-yl]-4-hydroxy-2-pyrrolidinyl)methyl ester
ggatttcatgtaaccaaga

SEQ ID NO: 72 - RNA, 21 nt, synthetic construct
  source 1..21: mol_type = other RNA
  modified_base 1: mod_base = OTHER; note = 2'-O-methyluridine-3'-phosphorothioate
  modified_base 2: mod_base = OTHER; note = 2'-O-methylguanosine-3'-phosphorothioate
  modified_base 3: mod_base = OTHER; note = 2'-O-methylguanosine-3'-phosphate
  modified_base 4: mod_base = OTHER; note = 2'-O-methylguanosine-3'-phosphate
  modified_base 5: mod_base = OTHER; note = 2'-O-methyladenosine-3'-phosphate
  modified_base 6: mod_base = OTHER; note = 2'-O-methyluridine-3'-phosphate
  modified_base 7: mod_base = OTHER; note = 2'-deoxy-2'-fluorouridine-3'-phosphate
  modified_base 8: mod_base = OTHER; note = 2'-O-methyluridine-3'-phosphate
  modified_base 9: mod_base = OTHER; note = 2'-deoxy-2'-fluorocytidine-3'-phosphate
  modified_base 10: mod_base = OTHER; note = 2'-deoxy-2'-fluoroadenosine-3'-phosphate
  modified_base 11: mod_base = OTHER; note = 2'-deoxy-2'-fluorouridine-3'-phosphate
  modified_base 12: mod_base = OTHER; note = 2'-O-methylguanosine-3'-phosphate
  modified_base 13: mod_base = OTHER; note = 2'-O-methyluridine-3'-phosphate
  modified_base 14: mod_base = OTHER; note = 2'-O-methyladenosine-3'-phosphate
  modified_base 15: mod_base = OTHER; note = 2'-O-methyladenosine-3'-phosphate
  modified_base 16: mod_base = OTHER; note = 2'-O-methylcytidine-3'-phosphate
  modified_base 17: mod_base = OTHER; note = 2'-O-methylcytidine-3'-phosphate
  modified_base 18: mod_base = OTHER; note = 2'-O-methyladenosine-3'-phosphate
  modified_base 19: mod_base = OTHER; note = 2'-O-methyladenosine-3'-phosphate
  modified_base 20: mod_base = OTHER; note = 2'-O-methylguanosine-3'-phosphate
  modified_base 21: mod_base = OTHER; note = 2'-O-methyladenosine-3'-phosphate ((2S,4R)-1-[29-[[2-(acetylamino)-2-deoxy-beta-D-galactopyra nosyl]oxy]-14,14-bis[[3-[[3-[[5-[[2-(acetylamino)-2-deoxy-b eta-D-galactopyranosyl]oxy]-1-oxopentyl]amino]propyl]amino] -3-oxopropoxy]methyl]-1,12,19,25-tetraoxo-16-oxa-13,20,24-t riazanonacos-1-yl]-4-hydroxy-2-pyrrolidinyl)methyl ester
tgggatttcatgtaaccaaga

SEQ ID NO: 73 - DNA, 21 bp, synthetic construct
  source 1..21: mol_type = other DNA
  modified_base 1: mod_base = OTHER; note = 2'-O-methyluridine-3'-phosphorothioate
  modified_base 2: mod_base = OTHER; note = 2'-O-methylguanosine-3'-phosphorothioate
  modified_base 3: mod_base = OTHER; note = 2'-O-methylguanosine-3'-phosphate
  modified_base 4: mod_base = OTHER; note = 2'-O-methylguanosine-3'-phosphate
  modified_base 5: mod_base = OTHER; note = 2'-O-methyladenosine-3'-phosphate
  modified_base 6: mod_base = OTHER; note = 2'-O-methyluridine-3'-phosphate
  modified_base 7: mod_base = OTHER; note = 2'-O-methyluridine-3'-phosphate
  modified_base 8: mod_base = OTHER; note = 2'-O-methyluridine-3'-phosphate
  modified_base 9: mod_base = OTHER; note = 2'-O-methylcytidine-3'-phosphate
  modified_base 10: mod_base = OTHER; note = 2'-O-methyladenosine-3'-phosphate
  modified_base 12: mod_base = OTHER; note = 2'-O-methylguanosine-3'-phosphate
  modified_base 13: mod_base = OTHER; note = 2'-O-methyluridine-3'-phosphate
  modified_base 14: mod_base = OTHER; note = 2'-O-methyladenosine-3'-phosphate
  modified_base 15: mod_base = OTHER; note = 2'-O-methyladenosine-3'-phosphate
  modified_base 16: mod_base = OTHER; note = 2'-O-methylcytidine-3'-phosphate
  modified_base 17: mod_base = OTHER; note = 2'-O-methyladenosine-3'-phosphate
  modified_base 18: mod_base = OTHER; note = 2'-O-methyladenosine-3'-phosphate
  modified_base 19: mod_base = OTHER; note = 2'-O-methyladenosine-3'-phosphate
  modified_base 20: mod_base = OTHER; note = 2'-O-methylguanosine-3'-phosphate
  modified_base 21: mod_base = OTHER; note = 2'-O-methyladenosine-3'-phosphate ((2S,4R)-1-[29-[[2-(acetylamino)-2-deoxy-beta-D-galactopyra nosyl]oxy]-14,14-bis[[3-[[3-[[5-[[2-(acetylamino)-2-deoxy-b eta-D-galactopyranosyl]oxy]-1-oxopentyl]amino]propyl]amino] -3-oxopropoxy]methyl]-1,12,19,25-tetraoxo-16-oxa-13,20,24-t riazanonacos-1-yl]-4-hydroxy-2-pyrrolidinyl)methyl ester
  misc_feature 1..10: note = RNA
  misc_feature 12..21: note = RNA
  misc_feature 11: note = DNA
tgggatttcatgtaacaaaga

SEQ ID NO: 74 - DNA, 21 bp, synthetic construct
  source 1..21: mol_type = other DNA
  modified_base 1: mod_base = OTHER; note = 2'-O-methyluridine-3'-phosphorothioate
  modified_base 2: mod_base = OTHER; note = 2'-O-methylguanosine-3'-phosphorothioate
  modified_base 3: mod_base = OTHER; note = 2'-O-methylguanosine-3'-phosphate
  modified_base 4: mod_base = OTHER; note = 2'-O-methylguanosine-3'-phosphate
  modified_base 5: mod_base = OTHER; note = 2'-O-methyladenosine-3'-phosphate
  modified_base 6: mod_base = OTHER; note = 2'-O-methyluridine-3'-phosphate
  modified_base 7: mod_base = OTHER; note = 2'-O-methyluridine-3'-phosphate
  modified_base 8: mod_base = OTHER; note = 2'-O-methyluridine-3'-phosphate
  modified_base 9: mod_base = OTHER; note = 2'-O-methylcytidine-3'-phosphate
  modified_base 10: mod_base = OTHER; note = 2'-O-methyladenosine-3'-phosphate
  modified_base 12: mod_base = OTHER; note = 2'-O-methylguanosine-3'-phosphate
  modified_base 13: mod_base = OTHER; note = 2'-O-methyluridine-3'-phosphate
  modified_base 14: mod_base = OTHER; note = 2'-O-methyladenosine-3'-phosphate
  modified_base 15: mod_base = OTHER; note = 2'-O-methyladenosine-3'-phosphate
  modified_base 16: mod_base = OTHER; note = 2'-O-methylcytidine-3'-phosphate
  modified_base 17: mod_base = OTHER; note = 2-hydroxymethyl-4-methoxy-tetrahydrofuran-3-phosphate
  modified_base 18: mod_base = OTHER; note = 2'-O-methyladenosine-3'-phosphate
  modified_base 19: mod_base = OTHER; note = 2'-O-methyladenosine-3'-phosphate
  modified_base 20: mod_base = OTHER; note = 2'-O-methylguanosine-3'-phosphate
  modified_base 21: mod_base = OTHER; note = 2'-O-methyladenosine-3'-phosphate ((2S,4R)-1-[29-[[2-(acetylamino)-2-deoxy-beta-D-galactopyra nosyl]oxy]-14,14-bis[[3-[[3-[[5-[[2-(acetylamino)-2-deoxy-b eta-D-galactopyranosyl]oxy]-1-oxopentyl]amino]propyl]amino] -3-oxopropoxy]methyl]-1,12,19,25-tetraoxo-16-oxa-13,20,24-t riazanonacos-1-yl]-4-hydroxy-2-pyrrolidinyl)methyl ester
  misc_feature 1..10: note = RNA
  misc_feature 12..21: note = RNA
  misc_feature 11: note = DNA
tgggatttcatgtaacnaaga

SEQ ID NO: 75 - DNA, 21 bp, synthetic construct
  source 1..21: mol_type = other DNA
  modified_base 1: mod_base = OTHER; note = 2'-O-methyluridine-3'-phosphorothioate
  modified_base 2: mod_base = OTHER; note = 2'-O-methylguanosine-3'-phosphorothioate
  modified_base 3: mod_base = OTHER; note = 2'-O-methylguanosine-3'-phosphate
  modified_base 4: mod_base = OTHER; note = 2'-O-methylguanosine-3'-phosphate
  modified_base 5: mod_base = OTHER; note = 2'-O-methyladenosine-3'-phosphate
  modified_base 6: mod_base = OTHER; note = 2'-O-methyluridine-3'-phosphate
  modified_base 7: mod_base = OTHER; note = 2'-O-methyluridine-3'-phosphate
  modified_base 8: mod_base = OTHER; note = 2'-O-methyluridine-3'-phosphate
  modified_base 9: mod_base = OTHER; note = 2'-O-methylcytidine-3'-phosphate
  modified_base 10: mod_base = OTHER; note = 2'-O-methyladenosine-3'-phosphate
  modified_base 12: mod_base = OTHER; note = 2'-O-methylguanosine-3'-phosphate
  modified_base 13: mod_base = OTHER; note = 2'-O-methyluridine-3'-phosphate
  modified_base 14: mod_base = OTHER; note = 2'-O-methyladenosine-3'-phosphate
  modified_base 15: mod_base = OTHER; note = 2'-O-methyladenosine-3'-phosphate
  modified_base 16: mod_base = OTHER; note = 2'-O-methylcytidine-3'-phosphate
  modified_base 17: mod_base = OTHER; note = 2-hydroxymethyl-4-methoxy-tetrahydrofuran-3-phosphate
  modified_base 18: mod_base = OTHER; note = 2'-O-methyladenosine-3'-phosphate
  modified_base 19: mod_base = OTHER; note = 2'-O-methyladenosine-3'-phosphate
  modified_base 20: mod_base = OTHER; note = 2'-O-methylguanosine-3'-phosphate
  modified_base 21: mod_base = OTHER; note = 2'-O-methyladenosine-3'-phosphate ((2S,4R)-1-[29-[[2-(acetylamino)-2-deoxy-beta-D-galactopyra nosyl]oxy]-14,14-bis[[3-[[3-[[5-[[2-(acetylamino)-2-deoxy-b eta-D-galactopyranosyl]oxy]-1-oxopentyl]amino]propyl]amino] -3-oxopropoxy]methyl]-1,12,19,25-tetraoxo-16-oxa-13,20,24-t riazanonacos-1-yl]-4-hydroxy-2-pyrrolidinyl)methyl ester
  misc_feature 1..10: note = RNA
  misc_feature 12..21: note = RNA
  misc_feature 11: note = DNA
tgggatttcatgtaacnaaga

SEQ ID NO: 76 - DNA, 21 bp, synthetic construct
  source 1..21: mol_type = other DNA
  modified_base 1: mod_base = OTHER; note = 2'-O-methyluridine-3'-phosphorothioate
  modified_base 2: mod_base = OTHER; note = 2'-O-methylguanosine-3'-phosphorothioate
  modified_base 3: mod_base = OTHER; note = 2'-O-methylguanosine-3'-phosphate
  modified_base 4: mod_base = OTHER; note = 2'-O-methylguanosine-3'-phosphate
  modified_base 5: mod_base = OTHER; note = 2'-O-methyladenosine-3'-phosphate
  modified_base 6: mod_base = OTHER; note = 2'-O-methyluridine-3'-phosphate
  modified_base 7: mod_base = OTHER; note = 2'-O-methyluridine-3'-phosphate
  modified_base 8: mod_base = OTHER; note = 2'-O-methyluridine-3'-phosphate
  modified_base 9: mod_base = OTHER; note = 2'-O-methylcytidine-3'-phosphate
  modified_base 10: mod_base = OTHER; note = 2'-O-methyladenosine-3'-phosphate
  modified_base 12: mod_base = OTHER; note = 2'-O-methylguanosine-3'-phosphate
  modified_base 13: mod_base = OTHER; note = 2'-O-methyluridine-3'-phosphate
  modified_base 14: mod_base = OTHER; note = 2'-O-methyladenosine-3'-phosphate
  modified_base 15: mod_base = OTHER; note = 2'-O-methyladenosine-3'-phosphate
  modified_base 16: mod_base = OTHER; note = 2'-O-methylcytidine-3'-phosphate
  modified_base 17: mod_base = OTHER; note = 2'-O-methyladenosine-3'-phosphate
  modified_base 18: mod_base = OTHER; note = 2'-O-methyladenosine-3'-phosphate
  modified_base 19: mod_base = OTHER; note = 2'-O-methyladenosine-3'-phosphate
  modified_base 20: mod_base = OTHER; note = 2'-O-methylguanosine-3'-phosphate
  modified_base 21: mod_base = OTHER; note = 2'-O-methyladenosine-3'-phosphate ((2S,4R)-1-[29-[[2-(acetylamino)-2-deoxy-beta-D-galactopyra nosyl]oxy]-14,14-bis[[3-[[3-[[5-[[2-(acetylamino)-2-deoxy-b eta-D-galactopyranosyl]oxy]-1-oxopentyl]amino]propyl]amino] -3-oxopropoxy]methyl]-1,12,19,25-tetraoxo-16-oxa-13,20,24-t riazanonacos-1-yl]-4-hydroxy-2-pyrrolidinyl)methyl ester
  misc_feature 1..10: note = RNA
  misc_feature 12..21: note = RNA
  misc_feature 11: note = DNA
tgggatttcatgtaacaaaga

SEQ ID NO: 77 - DNA, 21 bp, synthetic construct
  source 1..21: mol_type = other DNA
  modified_base 1: mod_base = OTHER; note = 2'-O-methyluridine-3'-phosphorothioate
  modified_base 2: mod_base = OTHER; note = 2'-O-methylguanosine-3'-phosphorothioate
  modified_base 3: mod_base = OTHER; note = 2'-O-methylguanosine-3'-phosphate
  modified_base 4: mod_base = OTHER; note = 2'-O-methylguanosine-3'-phosphate
  modified_base 5: mod_base = OTHER; note = 2'-O-methyladenosine-3'-phosphate
  modified_base 6: mod_base = OTHER; note = 2'-O-methyluridine-3'-phosphate
  modified_base 7: mod_base = OTHER; note = 2'-O-methyluridine-3'-phosphate
  modified_base 8: mod_base = OTHER; note = 2'-O-methyluridine-3'-phosphate
  modified_base 9: mod_base = OTHER; note = 2'-O-methylcytidine-3'-phosphate
  modified_base 10: mod_base = OTHER; note = 2'-O-methyladenosine-3'-phosphate
  modified_base 12: mod_base = OTHER; note = 2'-O-methylguanosine-3'-phosphate
  modified_base 13: mod_base = OTHER; note = 2'-O-methyluridine-3'-phosphate
  modified_base 14: mod_base = OTHER; note = 2'-O-methyladenosine-3'-phosphate
  modified_base 15: mod_base = OTHER; note = 2'-O-methyladenosine-3'-phosphate
  modified_base 16: mod_base = OTHER; note = 2'-O-methylcytidine-3'-phosphate
  modified_base 17: mod_base = OTHER; note = 2'-O-methyladenosine-3'-phosphate
  modified_base 18: mod_base = OTHER; note = 2'-O-methyladenosine-3'-phosphate
  modified_base 19: mod_base = OTHER; note = 2'-O-methyladenosine-3'-phosphate
  modified_base 20: mod_base = OTHER; note = 2'-O-methylguanosine-3'-phosphate
  modified_base 21: mod_base = OTHER; note = 2'-O-methyladenosine-3'-phosphate ((2S,4R)-1-[29-[[2-(acetylamino)-2-deoxy-beta-D-galactopyra nosyl]oxy]-14,14-bis[[3-[[3-[[5-[[2-(acetylamino)-2-deoxy-b eta-D-galactopyranosyl]oxy]-1-oxopentyl]amino]propyl]amino] -3-oxopropoxy]methyl]-1,12,19,25-tetraoxo-16-oxa-13,20,24-t riazanonacos-1-yl]-4-hydroxy-2-pyrrolidinyl)methyl ester
  misc_feature 1..10: note = RNA
  misc_feature 12..21: note = RNA
  misc_feature 11: note = DNA
tgggatttcatgtaacaaaga

SEQ ID NO: 78 - DNA, 21 bp, synthetic construct
  source 1..21: mol_type = other DNA
  modified_base 1: mod_base = OTHER; note = 2'-O-methyluridine-3'-phosphorothioate
  modified_base 2: mod_base = OTHER; note = 2'-O-methylguanosine-3'-phosphorothioate
  modified_base 3: mod_base = OTHER; note = 2'-O-methylguanosine-3'-phosphate
  modified_base 4: mod_base = OTHER; note = 2'-O-methylguanosine-3'-phosphate
  modified_base 5: mod_base = OTHER; note = 2'-O-methyladenosine-3'-phosphate
  modified_base 6: mod_base = OTHER; note = 2'-O-methyluridine-3'-phosphate
  modified_base 7: mod_base = OTHER; note = 2'-O-methyluridine-3'-phosphate
  modified_base 8: mod_base = OTHER; note = 2'-O-methyluridine-3'-phosphate
  modified_base 9: mod_base = OTHER; note = 2'-O-methylcytidine-3'-phosphate
  modified_base 10: mod_base = OTHER; note = 2'-O-methyladenosine-3'-phosphate
  modified_base 12: mod_base = OTHER; note = 2'-O-methylguanosine-3'-phosphate
  modified_base 13: mod_base = OTHER; note = 2'-O-methyluridine-3'-phosphate
  modified_base 14: mod_base = OTHER; note = 2'-O-methyladenosine-3'-phosphate
  modified_base 15: mod_base = OTHER; note = 2'-O-methyladenosine-3'-phosphate
  modified_base 16: mod_base = OTHER; note = 2'-O-methylcytidine-3'-phosphate
  modified_base 17: mod_base = OTHER; note = 2-hydroxymethyl-4-methoxy-tetrahydrofuran-3-phosphate
  modified_base 18: mod_base = OTHER; note = 2'-O-methyladenosine-3'-phosphate
  modified_base 19: mod_base = OTHER; note = 2'-O-methyladenosine-3'-phosphate
  modified_base 20: mod_base = OTHER; note = 2'-O-methylguanosine-3'-phosphate
  modified_base 21: mod_base = OTHER; note = 2'-O-methyladenosine-3'-phosphate ((2S,4R)-1-[29-[[2-(acetylamino)-2-deoxy-beta-D-galactopyra nosyl]oxy]-14,14-bis[[3-[[3-[[5-[[2-(acetylamino)-2-deoxy-b eta-D-galactopyranosyl]oxy]-1-oxopentyl]amino]propyl]amino] -3-oxopropoxy]methyl]-1,12,19,25-tetraoxo-16-oxa-13,20,24-t riazanonacos-1-yl]-4-hydroxy-2-pyrrolidinyl)methyl ester
  misc_feature 1..10: note = RNA
  misc_feature 12..21: note = RNA
  misc_feature 11: note = DNA
tgggatttcatgtaacnaaga

SEQ ID NO: 79 - DNA, 21 bp, synthetic construct
  source 1..21: mol_type = other DNA
  modified_base 1: mod_base = OTHER; note = 2'-O-methyluridine-3'-phosphorothioate
  modified_base 2: mod_base = OTHER; note = 2'-O-methylguanosine-3'-phosphorothioate
  modified_base 3: mod_base = OTHER; note = 2'-O-methylguanosine-3'-phosphate
  modified_base 4: mod_base = OTHER; note = 2'-O-methylguanosine-3'-phosphate
  modified_base 5: mod_base = OTHER; note = 2'-O-methyladenosine-3'-phosphate
  modified_base 6: mod_base = OTHER; note = 2'-O-methyluridine-3'-phosphate
  modified_base 7: mod_base = OTHER; note = 2'-O-methyluridine-3'-phosphate
  modified_base 8: mod_base = OTHER; note = 2'-O-methyluridine-3'-phosphate
  modified_base 9: mod_base = OTHER; note = 2'-O-methylcytidine-3'-phosphate
  modified_base 10: mod_base = OTHER; note = 2'-O-methyladenosine-3'-phosphate
  modified_base 12: mod_base = OTHER; note = 2'-O-methylguanosine-3'-phosphate
  modified_base 13: mod_base = OTHER; note = 2'-O-methyluridine-3'-phosphate
  modified_base 14: mod_base = OTHER; note = 2'-O-methyladenosine-3'-phosphate
  modified_base 15: mod_base = OTHER; note = 2'-O-methyladenosine-3'-phosphate
  modified_base 16: mod_base = OTHER; note = 2'-O-methylcytidine-3'-phosphate
  modified_base 17: mod_base = OTHER; note = 2'-O-methyladenosine-3'-phosphate
  modified_base 18: mod_base = OTHER; note = 2'-O-methyladenosine-3'-phosphate
  modified_base 19: mod_base = OTHER; note = 2'-O-methyladenosine-3'-phosphate
  modified_base 20: mod_base = OTHER; note = 2'-O-methylguanosine-3'-phosphate
  modified_base 21: mod_base = OTHER; note = 2'-O-methyladenosine-3'-phosphate ((2S,4R)-1-[29-[[2-(acetylamino)-2-deoxy-beta-D-galactopyra nosyl]oxy]-14,14-bis[[3-[[3-[[5-[[2-(acetylamino)-2-deoxy-b eta-D-galactopyranosyl]oxy]-1-oxopentyl]amino]propyl]amino] -3-oxopropoxy]methyl]-1,12,19,25-tetraoxo-16-oxa-13,20,24-t riazanonacos-1-yl]-4-hydroxy-2-pyrrolidinyl)methyl ester
  misc_feature 1..10: note = RNA
  misc_feature 12..21: note = RNA
  misc_feature 11: note = DNA
tgggatttcatgtaacaaaga

SEQ ID NO: 80 - DNA, 19 bp, synthetic construct
  source 1..19: mol_type = other DNA
  modified_base 1: mod_base = OTHER; note = 2'-O-methylguanosine-3'-phosphorothioate
  modified_base 2: mod_base = OTHER; note = 2'-O-methylguanosine-3'-phosphorothioate
  modified_base 3: mod_base = OTHER; note = 2'-O-methyladenosine-3'-phosphate
  modified_base 4: mod_base = OTHER; note = 2'-O-methyluridine-3'-phosphate
  modified_base 5: mod_base = OTHER; note = 2'-O-methyluridine-3'-phosphate
  modified_base 6: mod_base = OTHER; note = 2'-O-methyluridine-3'-phosphate
  modified_base 7: mod_base = OTHER; note = 2'-O-methylcytidine-3'-phosphate
  modified_base 8: mod_base = OTHER; note = 2'-O-methyladenosine-3'-phosphate
  modified_base 10: mod_base = OTHER; note = 2'-O-methylguanosine-3'-phosphate
  modified_base 11: mod_base = OTHER; note = 2'-O-methyluridine-3'-phosphate
  modified_base 12: mod_base = OTHER; note = 2'-O-methyladenosine-3'-phosphate
  modified_base 13: mod_base = OTHER; note = 2'-O-methyladenosine-3'-phosphate
  modified_base 14: mod_base = OTHER; note = 2'-O-methylcytidine-3'-phosphate
  modified_base 15: mod_base = OTHER; note = 2'-O-methyladenosine-3'-phosphate
  modified_base 16: mod_base = OTHER; note = 2'-O-methyladenosine-3'-phosphate
  modified_base 17: mod_base = OTHER; note = 2'-O-methyladenosine-3'-phosphate
  modified_base 18: mod_base = OTHER; note = 2'-O-methylguanosine-3'-phosphate
  modified_base 19: mod_base = OTHER; note = 2'-O-methyladenosine-3'-phosphate ((2S,4R)-1-[29-[[2-(acetylamino)-2-deoxy-beta-D-galactopyra nosyl]oxy]-14,14-bis[[3-[[3-[[5-[[2-(acetylamino)-2-deoxy-b eta-D-galactopyranosyl]oxy]-1-oxopentyl]amino]propyl]amino] -3-oxopropoxy]methyl]-1,12,19,25-tetraoxo-16-oxa-13,20,24-t riazanonacos-1-yl]-4-hydroxy-2-pyrrolidinyl)methyl ester
  misc_feature 1..8: note = RNA
  misc_feature 10..19: note = RNA
  misc_feature 9: note = DNA
ggatttcatgtaacaaaga

SEQ ID NO: 81 - DNA, 21 bp, synthetic construct
  source 1..21: mol_type = other DNA
  modified_base 1: mod_base = OTHER; note = 2'-O-methyluridine-3'-phosphorothioate
  modified_base 2: mod_base = OTHER; note = 2'-O-methylguanosine-3'-phosphorothioate
  modified_base 3: mod_base = OTHER; note = 2'-O-methylguanosine-3'-phosphate
  modified_base 4: mod_base = OTHER; note = 2'-O-methylguanosine-3'-phosphate
  modified_base 5: mod_base = OTHER; note = 2'-O-methyladenosine-3'-phosphate
  modified_base 6: mod_base = OTHER; note = 2'-O-methyluridine-3'-phosphate
  modified_base 7: mod_base = OTHER; note = 2'-O-methyluridine-3'-phosphate
  modified_base 8: mod_base = OTHER; note = 2'-O-methyluridine-3'-phosphate
  modified_base 9: mod_base = OTHER; note = 2'-O-methylcytidine-3'-phosphate
  modified_base 10: mod_base = OTHER; note = 2'-O-methyladenosine-3'-phosphate
  modified_base 12: mod_base = OTHER; note = 2'-O-methylguanosine-3'-phosphate
  modified_base 13: mod_base = OTHER; note = 2'-O-methyluridine-3'-phosphate
  modified_base 14: mod_base = OTHER; note = 2'-O-methyladenosine-3'-phosphate
  modified_base 15: mod_base = OTHER; note = 2'-O-methyladenosine-3'-phosphate
  modified_base 16: mod_base = OTHER; note = 2'-O-methylcytidine-3'-phosphate
  modified_base 17: mod_base = OTHER; note = 2-hydroxymethyl-4-methoxy-tetrahydrofuran-3-phosphate
  modified_base 18: mod_base = OTHER; note = 2'-O-methyladenosine-3'-phosphate
  modified_base 19: mod_base = OTHER; note = 2'-O-methyladenosine-3'-phosphate
  modified_base 20: mod_base = OTHER; note = 2'-O-methylguanosine-3'-phosphate
  modified_base 21: mod_base = OTHER; note = 2'-O-methyladenosine-3'-phosphate ((2S,4R)-1-[29-[[2-(acetylamino)-2-deoxy-beta-D-galactopyra nosyl]oxy]-14,14-bis[[3-[[3-[[5-[[2-(acetylamino)-2-deoxy-b eta-D-galactopyranosyl]oxy]-1-oxopentyl]amino]propyl]amino] -3-oxopropoxy]methyl]-1,12,19,25-tetraoxo-16-oxa-13,20,24-t riazanonacos-1-yl]-4-hydroxy-2-pyrrolidinyl)methyl ester
  misc_feature 1..10: note = RNA
  misc_feature 12..21: note = RNA
  misc_feature 11: note = DNA
tgggatttcatgtaacnaaga

SEQ ID NO: 82 - DNA, 19 bp, synthetic construct
  source 1..19: mol_type = other DNA
  modified_base 1: mod_base = OTHER; note = 2'-O-methylguanosine-3'-phosphorothioate
  modified_base 2: mod_base = OTHER; note = 2'-O-methylguanosine-3'-phosphorothioate
  modified_base 3: mod_base = OTHER; note = 2'-O-methyladenosine-3'-phosphate
  modified_base 4: mod_base = OTHER; note = 2'-O-methyluridine-3'-phosphate
  modified_base 5: mod_base = OTHER; note = 2'-O-methyluridine-3'-phosphate
  modified_base 6: mod_base = OTHER; note = 2'-O-methyluridine-3'-phosphate
  modified_base 7: mod_base = OTHER; note = 2'-O-methylcytidine-3'-phosphate
  modified_base 8: mod_base = OTHER; note = 2'-O-methyladenosine-3'-phosphate
  modified_base 10: mod_base = OTHER; note = 2'-O-methylguanosine-3'-phosphate
  modified_base 11: mod_base = OTHER; note = 2'-O-methyluridine-3'-phosphate
  modified_base 12: mod_base = OTHER; note = 2'-O-methyladenosine-3'-phosphate
  modified_base 13: mod_base = OTHER; note = 2'-O-methyladenosine-3'-phosphate
  modified_base 14: mod_base = OTHER; note = 2'-O-methylcytidine-3'-phosphate
  modified_base 15: mod_base = OTHER; note = 2'-O-methyladenosine-3'-phosphate
  modified_base 16: mod_base = OTHER; note = 2'-O-methyladenosine-3'-phosphate
  modified_base 17: mod_base = OTHER; note = 2'-O-methyladenosine-3'-phosphate
  modified_base 18: mod_base = OTHER; note = 2'-O-methylguanosine-3'-phosphate
  modified_base 19: mod_base = OTHER; note = 2'-O-methyladenosine-3'-phosphate ((2S,4R)-1-[29-[[2-(acetylamino)-2-deoxy-beta-D-galactopyra nosyl]oxy]-14,14-bis[[3-[[3-[[5-[[2-(acetylamino)-2-deoxy-b eta-D-galactopyranosyl]oxy]-1-oxopentyl]amino]propyl]amino] -3-oxopropoxy]methyl]-1,12,19,25-tetraoxo-16-oxa-13,20,24-t riazanonacos-1-yl]-4-hydroxy-2-pyrrolidinyl)methyl ester
  misc_feature 1..8: note = RNA
  misc_feature 10..19: note = RNA
  misc_feature 9: note = DNA
ggatttcatgtaacaaaga

SEQ ID NO: 83 - DNA, 21 bp, synthetic construct
  source 1..21: mol_type = other DNA
  modified_base 1: mod_base = OTHER; note = 2'-O-methyluridine-3'-phosphorothioate
  modified_base 2: mod_base = OTHER; note = 2'-O-methylguanosine-3'-phosphorothioate
  modified_base 3: mod_base = OTHER; note = 2'-O-methylguanosine-3'-phosphate
  modified_base 4: mod_base = OTHER; note = 2'-O-methylguanosine-3'-phosphate
  modified_base 5: mod_base = OTHER; note = 2'-O-methyladenosine-3'-phosphate
  modified_base 6: mod_base = OTHER; note = 2'-O-methyluridine-3'-phosphate
  modified_base 7: mod_base = OTHER; note = 2'-O-methyluridine-3'-phosphate
  modified_base 8: mod_base = OTHER; note = 2'-O-methyluridine-3'-phosphate
  modified_base 9: mod_base = OTHER; note = 2'-O-methylcytidine-3'-phosphate
  modified_base 10: mod_base = OTHER; note = 2'-O-methyladenosine-3'-phosphate
  modified_base 12: mod_base = OTHER; note = 2'-O-methylguanosine-3'-phosphate
  modified_base 13: mod_base = OTHER; note = 2'-O-methyluridine-3'-phosphate
  modified_base 14: mod_base = OTHER; note = 2'-O-methyladenosine-3'-phosphate
  modified_base 15: mod_base = OTHER; note = 2'-O-methyladenosine-3'-phosphate
  modified_base 16: mod_base = OTHER; note = 2'-O-methylcytidine-3'-phosphate
  modified_base 17: mod_base = OTHER; note = Cytidine-glycol nucleic acid (GNA), S-isomer
  modified_base 18: mod_base = OTHER; note = 2'-O-methyladenosine-3'-phosphate
  modified_base 19: mod_base = OTHER; note = 2'-O-methyladenosine-3'-phosphate
  modified_base 20: mod_base = OTHER; note = 2'-O-methylguanosine-3'-phosphate
  modified_base 21: mod_base = OTHER; note = 2'-O-methyladenosine-3'-phosphate ((2S,4R)-1-[29-[[2-(acetylamino)-2-deoxy-beta-D-galactopyra nosyl]oxy]-14,14-bis[[3-[[3-[[5-[[2-(acetylamino)-2-deoxy-b eta-D-galactopyranosyl]oxy]-1-oxopentyl]amino]propyl]amino] -3-oxopropoxy]methyl]-1,12,19,25-tetraoxo-16-oxa-13,20,24-t riazanonacos-1-yl]-4-hydroxy-2-pyrrolidinyl)methyl ester
  misc_feature 1..10: note = RNA
  misc_feature 12..21: note = RNA
  misc_feature 11: note = DNA
tgggatttcatgtaaccaaga

SEQ ID NO: 84 - DNA, 21 bp, synthetic construct
  source 1..21: mol_type = other DNA
  modified_base 1: mod_base = OTHER; note = 2'-O-methyluridine-3'-phosphorothioate
  modified_base 2: mod_base = OTHER; note = 2'-O-methylguanosine-3'-phosphorothioate
  modified_base 3: mod_base = OTHER; note = 2'-O-methylguanosine-3'-phosphate
  modified_base 4: mod_base = OTHER; note = 2'-O-methylguanosine-3'-phosphate
  modified_base 5: mod_base = OTHER; note = 2'-O-methyladenosine-3'-phosphate
  modified_base 6: mod_base = OTHER; note = 2'-O-methyluridine-3'-phosphate
  modified_base 7: mod_base = OTHER; note = 2'-O-methyluridine-3'-phosphate
  modified_base 8: mod_base = OTHER; note = 2'-O-methyluridine-3'-phosphate
  modified_base 9: mod_base = OTHER; note = 2'-O-methylcytidine-3'-phosphate
  modified_base 10: mod_base = OTHER; note = 2'-O-methyladenosine-3'-phosphate
  modified_base 12: mod_base = OTHER; note = 2'-O-methylguanosine-3'-phosphate
  modified_base 13: mod_base = OTHER; note = 2'-O-methyluridine-3'-phosphate
  modified_base 14: mod_base = OTHER; note = 2'-O-methyladenosine-3'-phosphate
  modified_base 15: mod_base = OTHER; note = 2'-O-methyladenosine-3'-phosphate
  modified_base 16: mod_base = OTHER; note = 2'-O-methylcytidine-3'-phosphate
  modified_base 17: mod_base = OTHER; note = Cytidine-glycol nucleic acid (GNA), S-isomer
  modified_base 18: mod_base = OTHER; note = 2'-O-methyladenosine-3'-phosphate
  modified_base 19: mod_base = OTHER; note = 2'-O-methyladenosine-3'-phosphate
  modified_base 20: mod_base = OTHER; note = 2'-O-methylguanosine-3'-phosphate
  modified_base 21: mod_base = OTHER; note = 2'-O-methyladenosine-3'-phosphate ((2S,4R)-1-[29-[[2-(acetylamino)-2-deoxy-beta-D-galactopyra nosyl]oxy]-14,14-bis[[3-[[3-[[5-[[2-(acetylamino)-2-deoxy-b eta-D-galactopyranosyl]oxy]-1-oxopentyl]amino]propyl]amino] -3-oxopropoxy]methyl]-1,12,19,25-tetraoxo-16-oxa-13,20,24-t riazanonacos-1-yl]-4-hydroxy-2-pyrrolidinyl)methyl ester
  misc_feature 1..10: note = RNA
  misc_feature 12..21: note = RNA
  misc_feature 11: note = DNA
tgggatttcatgtaaccaaga

SEQ ID NO: 85 - DNA, 21 bp, synthetic construct
  source 1..21: mol_type = other DNA
  modified_base 1: mod_base = OTHER; note = 2'-O-methyluridine-3'-phosphorothioate
  modified_base 2: mod_base = OTHER; note = 2'-O-methylguanosine-3'-phosphorothioate
  modified_base 3: mod_base = OTHER; note = 2'-O-methylguanosine-3'-phosphate
  modified_base 4: mod_base = OTHER; note = 2'-O-methylguanosine-3'-phosphate
  modified_base 5: mod_base = OTHER; note = 2'-O-methyladenosine-3'-phosphate
  modified_base 6: mod_base = OTHER; note = 2'-O-methyluridine-3'-phosphate
  modified_base 7: mod_base = OTHER; note = 2'-O-methyluridine-3'-phosphate
  modified_base 8: mod_base = OTHER; note = 2'-O-methyluridine-3'-phosphate
  modified_base 9: mod_base = OTHER; note = 2'-O-methylcytidine-3'-phosphate
  modified_base 10: mod_base = OTHER; note = 2'-O-methyladenosine-3'-phosphate
  modified_base 12: mod_base = OTHER; note = 2'-O-methylguanosine-3'-phosphate
  modified_base 13: mod_base = OTHER; note = 2'-O-methyluridine-3'-phosphate
  modified_base 14: mod_base = OTHER; note = 2'-O-methyladenosine-3'-phosphate
  modified_base 15: mod_base = OTHER; note = 2'-O-methyladenosine-3'-phosphate
  modified_base 16: mod_base = OTHER; note = 2'-O-methylcytidine-3'-phosphate
  modified_base 17: mod_base = OTHER; note = Cytidine-glycol nucleic acid (GNA), S-isomer
  modified_base 18: mod_base = OTHER; note = 2'-O-methyladenosine-3'-phosphate
  modified_base 19: mod_base = OTHER; note = 2'-O-methyladenosine-3'-phosphate
  modified_base 20: mod_base = OTHER; note = 2'-O-methylguanosine-3'-phosphate
  modified_base 21: mod_base = OTHER; note = 2'-O-methyladenosine-3'-phosphate ((2S,4R)-1-[29-[[2-(acetylamino)-2-deoxy-beta-D-galactopyra nosyl]oxy]-14,14-bis[[3-[[3-[[5-[[2-(acetylamino)-2-deoxy-b eta-D-galactopyranosyl]oxy]-1-oxopentyl]amino]propyl]amino] -3-oxopropoxy]methyl]-1,12,19,25-tetraoxo-16-oxa-13,20,24-t riazanonacos-1-yl]-4-hydroxy-2-pyrrolidinyl)methyl ester
  misc_feature 1..10: note = RNA
  misc_feature 12..21: note = RNA
  misc_feature 11: note = DNA
tgggatttcatgtaaccaaga

SEQ ID NO: 86 - DNA, 21 bp, synthetic construct
  source 1..21: mol_type = other DNA
  modified_base 1: mod_base = OTHER; note = 2'-O-methyluridine-3'-phosphorothioate
  modified_base 2: mod_base = OTHER; note = 2'-O-methylguanosine-3'-phosphorothioate
  modified_base 3: mod_base = OTHER; note = 2'-O-methylguanosine-3'-phosphate
  modified_base 4: mod_base = OTHER; note = 2'-O-methylguanosine-3'-phosphate
  modified_base 5: mod_base = OTHER; note = 2'-O-methyladenosine-3'-phosphate
  modified_base 6: mod_base = OTHER; note = 2'-O-methyluridine-3'-phosphate
  modified_base 7: mod_base = OTHER; note = 2'-O-methyluridine-3'-phosphate
  modified_base 8: mod_base = OTHER; note = 2'-O-methyluridine-3'-phosphate
  modified_base 9: mod_base = OTHER; note = 2'-O-methylcytidine-3'-phosphate
  modified_base 10: mod_base = OTHER; note = 2'-O-methyladenosine-3'-phosphate
  modified_base 12: mod_base = OTHER; note = 2'-O-methylguanosine-3'-phosphate
  modified_base 13: mod_base = OTHER; note = 2'-O-methyluridine-3'-phosphate
  modified_base 14: mod_base = OTHER; note = 2'-O-methyladenosine-3'-phosphate
  modified_base 15: mod_base = OTHER; note = 2'-O-methyladenosine-3'-phosphate
  modified_base 16: mod_base = OTHER; note = 2'-O-methylcytidine-3'-phosphate
  modified_base 17: mod_base = OTHER; note = Cytidine-glycol nucleic acid (GNA), S-isomer
  modified_base 18: mod_base = OTHER; note = 2'-O-methyladenosine-3'-phosphate
  modified_base 19: mod_base = OTHER; note = 2'-O-methyladenosine-3'-phosphate
  modified_base 20: mod_base = OTHER; note = 2'-O-methylguanosine-3'-phosphate
  modified_base 21: mod_base = OTHER; note = 2'-O-methyladenosine-3'-phosphate ((2S,4R)-1-[29-[[2-(acetylamino)-2-deoxy-beta-D-galactopyra nosyl]oxy]-14,14-bis[[3-[[3-[[5-[[2-(acetylamino)-2-deoxy-b eta-D-galactopyranosyl]oxy]-1-oxopentyl]amino]propyl]amino] -3-oxopropoxy]methyl]-1,12,19,25-tetraoxo-16-oxa-13,20,24-t riazanonacos-1-yl]-4-hydroxy-2-pyrrolidinyl)methyl ester
  misc_feature 1..10: note = RNA
  misc_feature 12..21: note = RNA
  misc_feature 11: note = DNA
tgggatttcatgtaaccaaga

SEQ ID NO: 87 - RNA, 21 nt, synthetic construct
  source 1..21: mol_type = other RNA
  modified_base 1: mod_base = OTHER; note = 2'-deoxy-2'-fluorouridine-3'-phosphate
  modified_base 2: mod_base = OTHER; note = 2'-O-methylguanosine-3'-phosphate
  modified_base 3: mod_base = OTHER; note = 2'-deoxy-2'-fluoroguanosine-3'-phosphate
  modified_base 4: mod_base = OTHER; note = 2'-O-methylguanosine-3'-phosphate
  modified_base 5: mod_base = OTHER; note = 2'-deoxy-2'-fluoroadenosine-3'-phosphate
  modified_base 6: mod_base = OTHER; note = 2'-O-methyluridine-3'-phosphate
  modified_base 7: mod_base = OTHER; note = 2'-deoxy-2'-fluorouridine-3'-phosphate
  modified_base 8: mod_base = OTHER; note = 2'-O-methyluridine-3'-phosphate
  modified_base 9: mod_base = OTHER; note = 2'-deoxy-2'-fluorocytidine-3'-phosphate
  modified_base 10: mod_base = OTHER; note = 2'-deoxy-2'-fluoroadenosine-3'-phosphate
  modified_base 11: mod_base = OTHER; note = 2'-deoxy-2'-fluorouridine-3'-phosphate
  modified_base 12: mod_base = OTHER; note = 2'-O-methylguanosine-3'-phosphate
  modified_base 13: mod_base = OTHER; note = 2'-deoxy-2'-fluorouridine-3'-phosphate
  modified_base 14: mod_base = OTHER; note = 2'-O-methyladenosine-3'-phosphate
  modified_base 15: mod_base = OTHER; note = 2'-O-methyladenosine-3'-phosphate
  modified_base 16: mod_base = OTHER; note = 2'-O-methylcytidine-3'-phosphate
  modified_base 17: mod_base = OTHER; note = 2'-deoxy-2'-fluorocytidine-3'-phosphate
  modified_base 18: mod_base = OTHER; note = 2'-O-methyladenosine-3'-phosphate
  modified_base 19: mod_base = OTHER; note = 2'-deoxy-2'-fluoroadenosine-3'-phosphate
  modified_base 20: mod_base = OTHER; note = 2'-O-methylguanosine-3'-phosphate
  modified_base 21: mod_base = OTHER; note = 2'-deoxy-2'-fluoroadenosine-3'-phosphate ((2S,4R)-1-[29-[[2-(acetylamino)-2-deoxy-beta-D-galactopyra nosyl]oxy]-14,14-bis[[3-[[3-[[5-[[2-(acetylamino)-2-deoxy-b eta-D-galactopyranosyl]oxy]-1-oxopentyl]amino]propyl]amino] -3-oxopropoxy]methyl]-1,12,19,25-tetraoxo-16-oxa-13,20,24-t riazanonacos-1-yl]-4-hydroxy-2-pyrrolidinyl)methyl ester
tgggatttcatgtaaccaaga

SEQ ID NO: 88 - RNA, 21 nt, synthetic construct
  source 1..21: mol_type = other RNA
  modified_base 1: mod_base = OTHER; note = 2'-deoxy-2'-fluorouridine-3'-phosphate
  modified_base 2: mod_base = OTHER; note = 2'-O-methylguanosine-3'-phosphate
  modified_base 3: mod_base = OTHER; note = 2'-deoxy-2'-fluoroguanosine-3'-phosphate
  modified_base 4: mod_base = OTHER; note = 2'-O-methylguanosine-3'-phosphate
  modified_base 5: mod_base = OTHER; note = 2'-deoxy-2'-fluoroadenosine-3'-phosphate
  modified_base 6: mod_base = OTHER; note = 2'-O-methyluridine-3'-phosphate
  modified_base 7: mod_base = OTHER; note = 2'-deoxy-2'-fluorouridine-3'-phosphate
  modified_base 8: mod_base = OTHER; note = 2'-O-methyluridine-3'-phosphate
  modified_base 9: mod_base = OTHER; note = 2'-deoxy-2'-fluorocytidine-3'-phosphate
  modified_base 10: mod_base = OTHER; note = 2'-deoxy-2'-fluoroadenosine-3'-phosphate
  modified_base 11: mod_base = OTHER; note = 2'-deoxy-2'-fluorouridine-3'-phosphate
  modified_base 12: mod_base = OTHER; note = 2'-O-methylguanosine-3'-phosphate
  modified_base 13: mod_base = OTHER; note = 2'-deoxy-2'-fluorouridine-3'-phosphate
  modified_base 14: mod_base = OTHER; note = 2'-O-methyladenosine-3'-phosphate
  modified_base 15: mod_base = OTHER; note = 2'-O-methyladenosine-3'-phosphate
  modified_base 16: mod_base = OTHER; note = 2'-O-methylcytidine-3'-phosphate
  modified_base 17: mod_base = OTHER; note = 2'-deoxy-2'-fluorocytidine-3'-phosphate
  modified_base 18: mod_base = OTHER; note = 2'-O-methyladenosine-3'-phosphate
  modified_base 19: mod_base = OTHER; note = 2'-deoxy-2'-fluoroadenosine-3'-phosphate
  modified_base 20: mod_base = OTHER; note = 2'-O-methylguanosine-3'-phosphate
  modified_base 21: mod_base = OTHER; note = 2'-deoxy-2'-fluoroadenosine-3'-phosphate ((2S,4R)-1-[29-[[2-(acetylamino)-2-deoxy-beta-D-galactopyra nosyl]oxy]-14,14-bis[[3-[[3-[[5-[[2-(acetylamino)-2-deoxy-b eta-D-galactopyranosyl]oxy]-1-oxopentyl]amino]propyl]amino] -3-oxopropoxy]methyl]-1,12,19,25-tetraoxo-16-oxa-13,20,24-t riazanonacos-1-yl]-4-hydroxy-2-pyrrolidinyl)methyl ester
tgggatttcatgtaaccaaga

SEQ ID NO: 89 - RNA, 21 nt, synthetic construct
  source 1..21: mol_type = other RNA
  modified_base 1: mod_base = OTHER; note = 2'-deoxy-2'-fluorouridine-3'-phosphorothioate
  modified_base 2: mod_base = OTHER; note = 2'-O-methylguanosine-3'-phosphorothioate
  modified_base 3: mod_base = OTHER; note = 2'-deoxy-2'-fluoroguanosine-3'-phosphate
  modified_base 4: mod_base = OTHER; note = 2'-O-methylguanosine-3'-phosphate
  modified_base 5: mod_base = OTHER; note = 2'-deoxy-2'-fluoroadenosine-3'-phosphate
  modified_base 6: mod_base = OTHER; note = 2'-O-methyluridine-3'-phosphate
  modified_base 7: mod_base = OTHER; note = 2'-deoxy-2'-fluorouridine-3'-phosphate
  modified_base 8: mod_base = OTHER; note = 2'-O-methyluridine-3'-phosphate
  modified_base 9: mod_base = OTHER; note = 2'-deoxy-2'-fluorocytidine-3'-phosphate
  modified_base 10: mod_base = OTHER; note = 2'-deoxy-2'-fluoroadenosine-3'-phosphate
  modified_base 11: mod_base = OTHER; note = 2'-deoxy-2'-fluorouridine-3'-phosphate
  modified_base 12: mod_base = OTHER; note = 2'-O-methylguanosine-3'-phosphate
  modified_base 13: mod_base = OTHER; note = 2'-deoxy-2'-fluorouridine-3'-phosphate
  modified_base 14: mod_base = OTHER; note = 2'-O-methyladenosine-3'-phosphate
  modified_base 15: mod_base = OTHER; note = 2'-deoxy-2'-fluoroadenosine-3'-phosphate
  modified_base 16: mod_base = OTHER; note = 2'-O-methylcytidine-3'-phosphate
  modified_base 17: mod_base = OTHER; note = 2'-deoxy-2'-fluorocytidine-3'-phosphate
  modified_base 18: mod_base = OTHER; note = 2'-O-methyladenosine-3'-phosphate
  modified_base 19: mod_base = OTHER; note = 2'-deoxy-2'-fluoroadenosine-3'-phosphate
  modified_base 20: mod_base = OTHER; note = 2'-O-methylguanosine-3'-phosphate
  modified_base 21: mod_base = OTHER; note = 2'-deoxy-2'-fluoroadenosine-3'-phosphate ((2S,4R)-1-[29-[[2-(acetylamino)-2-deoxy-beta-D-galactopyra nosyl]oxy]-14,14-bis[[3-[[3-[[5-[[2-(acetylamino)-2-deoxy-b eta-D-galactopyranosyl]oxy]-1-oxopentyl]amino]propyl]amino] -3-oxopropoxy]methyl]-1,12,19,25-tetraoxo-16-oxa-13,20,24-t riazanonacos-1-yl]-4-hydroxy-2-pyrrolidinyl)methyl ester
tgggatttcatgtaaccaaga

SEQ ID NO: 90 - RNA, 21 nt, synthetic construct
  source 1..21: mol_type = other RNA
  modified_base 1: mod_base = OTHER; note = 2'-deoxy-2'-fluorouridine-3'-phosphate
  modified_base 2: mod_base = OTHER; note = 2'-O-methylguanosine-3'-phosphate
  modified_base 3: mod_base = OTHER; note = 2'-deoxy-2'-fluoroguanosine-3'-phosphate
  modified_base 4: mod_base = OTHER; note = 2'-O-methylguanosine-3'-phosphate
  modified_base 5: mod_base = OTHER; note = 2'-deoxy-2'-fluoroadenosine-3'-phosphate
  modified_base 6: mod_base = OTHER; note = 2'-O-methyluridine-3'-phosphate
  modified_base 7: mod_base = OTHER; note = 2'-deoxy-2'-fluorouridine-3'-phosphate
  modified_base 8: mod_base = OTHER; note = 2'-O-methyluridine-3'-phosphate
  modified_base 9: mod_base = OTHER; note = 2'-deoxy-2'-fluorocytidine-3'-phosphate
  modified_base 10: mod_base = OTHER; note = 2'-deoxy-2'-fluoroadenosine-3'-phosphate
  modified_base 11: mod_base = OTHER; note = 2'-deoxy-2'-fluorouridine-3'-phosphate
  modified_base 12: mod_base = OTHER; note = 2'-O-methylguanosine-3'-phosphate
  modified_base 13: mod_base = OTHER; note = 2'-deoxy-2'-fluorouridine-3'-phosphate
  modified_base 14: mod_base = OTHER; note = 2'-O-methyladenosine-3'-phosphate
  modified_base 15: mod_base = OTHER; note = 2'-O-methyladenosine-3'-phosphate
  modified_base 16: mod_base = OTHER; note = 2'-O-methylcytidine-3'-phosphate
  modified_base 17: mod_base = OTHER; note = 2'-deoxy-2'-fluorocytidine-3'-phosphate
  modified_base 18: mod_base = OTHER; note = 2'-O-methyladenosine-3'-phosphate
  modified_base 19: mod_base = OTHER; note = 2'-deoxy-2'-fluoroadenosine-3'-phosphate
  modified_base 20: mod_base = OTHER; note = 2'-O-methylguanosine-3'-phosphate
  modified_base 21: mod_base = OTHER; note = 2'-deoxy-2'-fluoroadenosine-3'-phosphate ((2S,4R)-1-[29-[[2-(acetylamino)-2-deoxy-beta-D-galactopyra nosyl]oxy]-14,14-bis[[3-[[3-[[5-[[2-(acetylamino)-2-deoxy-b eta-D-galactopyranosyl]oxy]-1-oxopentyl]amino]propyl]amino] -3-oxopropoxy]methyl]-1,12,19,25-tetraoxo-16-oxa-13,20,24-t riazanonacos-1-yl]-4-hydroxy-2-pyrrolidinyl)methyl ester
tgggatttcatgtaaccaaga

SEQ ID NO: 91 - RNA, 21 nt, synthetic construct
  source 1..21: mol_type = other RNA
  modified_base 1: mod_base = OTHER; note = 2'-deoxy-2'-fluorouridine-3'-phosphorothioate
  modified_base 2: mod_base = OTHER; note = 2'-O-methylguanosine-3'-phosphorothioate
  modified_base 3: mod_base = OTHER; note = 2'-deoxy-2'-fluoroguanosine-3'-phosphate
  modified_base 4: mod_base = OTHER; note = 2'-O-methylguanosine-3'-phosphate
  modified_base 5: mod_base = OTHER; note = 2'-deoxy-2'-fluoroadenosine-3'-phosphate
  modified_base 6: mod_base = OTHER; note = 2'-O-methyluridine-3'-phosphate
  modified_base 7: mod_base = OTHER; note = 2'-deoxy-2'-fluorouridine-3'-phosphate
  modified_base 8: mod_base = OTHER; note = 2'-O-methyluridine-3'-phosphate
  modified_base 9: mod_base = OTHER; note = 2'-deoxy-2'-fluorocytidine-3'-phosphate
  modified_base 10: mod_base = OTHER; note = 2'-deoxy-2'-fluoroadenosine-3'-phosphate
  modified_base 11: mod_base = OTHER; note = 2'-deoxy-2'-fluorouridine-3'-phosphate
  modified_base 12: mod_base = OTHER; note = 2'-O-methylguanosine-3'-phosphate
  modified_base 13: mod_base = OTHER; note = 2'-deoxy-2'-fluorouridine-3'-phosphate
  modified_base 14: mod_base = OTHER; note = 2'-O-methyladenosine-3'-phosphate
  modified_base 15: mod_base = OTHER; note = 2'-deoxy-2'-fluoroadenosine-3'-phosphate
  modified_base 16: mod_base = OTHER; note = 2'-O-methylcytidine-3'-phosphate
  modified_base 17: mod_base = OTHER; note = 2'-deoxy-2'-fluorocytidine-3'-phosphate
  modified_base 18: mod_base = OTHER; note = 2'-O-methyladenosine-3'-phosphate
  modified_base 19: mod_base = OTHER; note = 2'-deoxy-2'-fluoroadenosine-3'-phosphate
  modified_base 20: mod_base = OTHER; note = 2'-O-methylguanosine-3'-phosphate
  modified_base 21: mod_base = OTHER; note = 2'-deoxy-2'-fluoroadenosine-3'-phosphate ((2S,4R)-1-[29-[[2-(acetylamino)-2-deoxy-beta-D-galactopyra nosyl]oxy]-14,14-bis[[3-[[3-[[5-[[2-(acetylamino)-2-deoxy-b eta-D-galactopyranosyl]oxy]-1-oxopentyl]amino]propyl]amino] -3-oxopropoxy]methyl]-1,12,19,25-tetraoxo-16-oxa-13,20,24-t riazanonacos-1-yl]-4-hydroxy-2-pyrrolidinyl)methyl ester
tgggatttcatgtaaccaaga

SEQ ID NO: 92 - RNA, 21 nt, synthetic construct
  source 1..21: mol_type = other RNA
  modified_base 1: mod_base = OTHER; note = 2'-deoxy-2'-fluorouridine-3'-phosphorothioate
  modified_base 2: mod_base = OTHER; note = 2'-O-methylguanosine-3'-phosphorothioate
  modified_base 3: mod_base = OTHER; note = 2'-deoxy-2'-fluoroguanosine-3'-phosphate
  modified_base 4: mod_base = OTHER; note = 2'-O-methylguanosine-3'-phosphate
  modified_base 5: mod_base = OTHER; note = 2'-deoxy-2'-fluoroadenosine-3'-phosphate
  modified_base 6: mod_base = OTHER; note = 2'-O-methyluridine-3'-phosphate
  modified_base 7: mod_base = OTHER; note = 2'-deoxy-2'-fluorouridine-3'-phosphate
  modified_base 8: mod_base = OTHER; note = 2'-O-methyluridine-3'-phosphate
  modified_base 9: mod_base = OTHER; note = 2'-deoxy-2'-fluorocytidine-3'-phosphate
  modified_base 10: mod_base = OTHER; note = 2'-deoxy-2'-fluoroadenosine-3'-phosphate
  modified_base 11: mod_base = OTHER; note = 2'-deoxy-2'-fluorouridine-3'-phosphate
  modified_base 12: mod_base = OTHER; note = 2'-O-methylguanosine-3'-phosphate
  modified_base 13: mod_base = OTHER; note = 2'-deoxy-2'-fluorouridine-3'-phosphate
  modified_base 14: mod_base = OTHER; note = 2'-O-methyladenosine-3'-phosphate
  modified_base 15: mod_base = OTHER; note = 2'-deoxy-2'-fluoroadenosine-3'-phosphate
  modified_base 16: mod_base = OTHER; note = 2'-O-methylcytidine-3'-phosphate
  modified_base 17: mod_base = OTHER; note = 2'-deoxy-2'-fluorocytidine-3'-phosphate
  modified_base 18: mod_base = OTHER; note = 2'-O-methyladenosine-3'-phosphate
  modified_base 19: mod_base = OTHER; note = 2'-deoxy-2'-fluoroadenosine-3'-phosphate
  modified_base 20: mod_base = OTHER; note = 2'-O-methylguanosine-3'-phosphate
  modified_base 21: mod_base = OTHER; note = 2'-deoxy-2'-fluoroadenosine-3'-phosphate ((2S,4R)-1-[29-[[2-(acetylamino)-2-deoxy-beta-D-galactopyra nosyl]oxy]-14,14-bis[[3-[[3-[[5-[[2-(acetylamino)-2-deoxy-b eta-D-galactopyranosyl]oxy]-1-oxopentyl]amino]propyl]amino] -3-oxopropoxy]methyl]-1,12,19,25-tetraoxo-16-oxa-13,20,24-t riazanonacos-1-yl]-4-hydroxy-2-pyrrolidinyl)methyl ester
tgggatttcatgtaaccaaga

SEQ ID NO: 93 - RNA, 23 nt, synthetic construct
  source 1..23: mol_type = other RNA
  modified_base 1: mod_base = OTHER; note = 2'-O-methyluridine-3'-phosphorothioate 5'phosphate
  modified_base 2: mod_base = OTHER; note = 2'-deoxy-2'-fluorocytidine-3'-phosphorothioate
  modified_base 3: mod_base = OTHER; note = 2'-O-methyluridine-3'-phosphate
  modified_base 4: mod_base = OTHER; note = 2'-O-methyluridine-3'-phosphate
  modified_base 5: mod_base = OTHER; note = 2'-O-methylguanosine-3'-phosphate
  modified_base 6: mod_base = OTHER; note = 2'-deoxy-2'-fluoroguanosine-3'-phosphate
  modified_base 7: mod_base = OTHER; note = 2'-O-methyluridine-3'-phosphate
  modified_base 8: mod_base = OTHER; note = 2'-O-methyluridine-3'-phosphate
  modified_base 9: mod_base = OTHER; note = 2'-deoxy-2'-fluoroadenosine-3'-phosphate
  modified_base 10: mod_base = OTHER; note = 2'-O-methylcytidine-3'-phosphate
  modified_base 11: mod_base = OTHER; note = 2'-O-methyladenosine-3'-phosphate
  modified_base 12: mod_base = OTHER; note = 2'-O-methyluridine-3'-phosphate
  modified_base 13: mod_base = OTHER; note = 2'-O-methylguanosine-3'-phosphate
  modified_base 14: mod_base = OTHER; note = 2'-deoxy-2'-fluoroadenosine-3'-phosphate
  modified_base 15: mod_base = OTHER; note = 2'-O-methyladenosine-3'-phosphate
  modified_base 16: mod_base = OTHER; note = 2'-deoxy-2'-fluoroadenosine-3'-phosphate
  modified_base 17: mod_base = OTHER; note = 2'-O-methyluridine-3'-phosphate
  modified_base 18: mod_base = OTHER; note = 2'-O-methylcytidine-3'-phosphate
  modified_base 19: mod_base = OTHER; note = 2'-O-methylcytidine-3'-phosphate
  modified_base 20: mod_base = OTHER; note = 2'-O-methylcytidine-3'-phosphate
  modified_base 21: mod_base = OTHER; note = 2'-O-methyladenosine-3'-phosphorothioate
  modified_base 22: mod_base = OTHER; note = 2'-O-methyluridine-3'-phosphorothioate
  modified_base 23: mod_base = OTHER; note = 2'-O-methylcytidine
tcttggttacatgaaatcccatc

SEQ ID NO: 94 - RNA, 23 nt, synthetic construct
  source 1..23: mol_type = other RNA
  modified_base 1: mod_base = OTHER; note = 2'-O-methyluridine-3'-phosphorothioate 5'phosphate
  modified_base 2: mod_base = OTHER; note = 2'-deoxy-2'-fluorocytidine-3'-phosphorothioate
  modified_base 3: mod_base = OTHER; note = 2'-O-methyluridine-3'-phosphate
  modified_base 4: mod_base = OTHER; note = 2'-O-methyluridine-3'-phosphate
  modified_base 5: mod_base = OTHER; note = 2'-O-methylguanosine-3'-phosphate
  modified_base 6: mod_base = OTHER; note = 2'-deoxy-2'-fluoroguanosine-3'-phosphate
  modified_base 7: mod_base = OTHER; note = 2'-O-methyluridine-3'-phosphate
  modified_base 8: mod_base = OTHER; note = 2'-O-methyluridine-3'-phosphate
  modified_base 9: mod_base = OTHER; note = 2'-O-methyladenosine-3'-phosphate
  modified_base 10: mod_base = OTHER; note = 2'-O-methylcytidine-3'-phosphate
  modified_base 11: mod_base = OTHER; note = 2'-O-methyladenosine-3'-phosphate
  modified_base 12: mod_base = OTHER; note = 2'-O-methyluridine-3'-phosphate
  modified_base 13: mod_base = OTHER; note = 2'-O-methylguanosine-3'-phosphate
  modified_base 14: mod_base = OTHER; note = 2'-deoxy-2'-fluoroadenosine-3'-phosphate
  modified_base 15: mod_base = OTHER; note = 2'-O-methyladenosine-3'-phosphate
  modified_base 16: mod_base = OTHER; note = 2'-deoxy-2'-fluoroadenosine-3'-phosphate
  modified_base 17: mod_base = OTHER; note = 2'-O-methyluridine-3'-phosphate
  modified_base 18: mod_base = OTHER; note = 2'-O-methylcytidine-3'-phosphate
  modified_base 19: mod_base = OTHER; note = 2'-O-methylcytidine-3'-phosphate
  modified_base 20: mod_base = OTHER; note = 2'-O-methylcytidine-3'-phosphate
  modified_base 21: mod_base = OTHER; note = 2'-O-methyladenosine-3'-phosphorothioate
  modified_base 22: mod_base = OTHER; note = 2'-O-methyluridine-3'-phosphorothioate
  modified_base 23: mod_base = OTHER; note = 2'-O-methylcytidine
tcttggttacatgaaatcccatc

SEQ ID NO: 95 - RNA, 23 nt, synthetic construct
  source 1..23: mol_type = other RNA
  modified_base 1: mod_base = OTHER; note = 2'-O-methyluridine-3'-phosphorothioate 5'phosphate
  modified_base 2: mod_base = OTHER; note = 2'-deoxy-2'-fluorocytidine-3'-phosphorothioate
  modified_base 3: mod_base = OTHER; note = 2'-O-methyluridine-3'-phosphate
  modified_base 4: mod_base = OTHER; note = 2'-O-methyluridine-3'-phosphate
  modified_base 5: mod_base = OTHER; note = 2'-O-methylguanosine-3'-phosphate
  modified_base 6: mod_base = OTHER; note = 2'-deoxy-2'-fluoroguanosine-3'-phosphate
  modified_base 7: mod_base = OTHER; note = 2'-O-methyluridine-3'-phosphate
  modified_base 8: mod_base = OTHER; note = 2'-O-methyluridine-3'-phosphate
  modified_base 9: mod_base = OTHER; note = 2'-deoxy-2'-fluoroadenosine-3'-phosphate
  modified_base 10: mod_base = OTHER; note = 2'-O-methylcytidine-3'-phosphate
  modified_base 11: mod_base = OTHER; note = 2'-O-methyladenosine-3'-phosphate
  modified_base 12: mod_base = OTHER; note = 2'-O-methyluridine-3'-phosphate
  modified_base 13: mod_base = OTHER; note = 2'-O-methylguanosine-3'-phosphate
  modified_base 14: mod_base = OTHER; note = 2'-deoxy-2'-fluoroadenosine-3'-phosphate
  modified_base 15: mod_base = OTHER; note = 2'-deoxy-2'-fluoroadenosine-3'-phosphate
  modified_base 16: mod_base = OTHER; note = 2'-O-methyladenosine-3'-phosphate
  modified_base 17: mod_base = OTHER; note = 2'-O-methyluridine-3'-phosphate
  modified_base 18: mod_base = OTHER; note = 2'-O-methylcytidine-3'-phosphate
  modified_base 19: mod_base = OTHER; note = 2'-O-methylcytidine-3'-phosphate
  modified_base 20: mod_base = OTHER; note = 2'-O-methylcytidine-3'-phosphate
  modified_base 21: mod_base = OTHER; note = 2'-O-methyladenosine-3'-phosphorothioate
  modified_base 22: mod_base = OTHER; note = 2'-O-methyluridine-3'-phosphorothioate
  modified_base 23: mod_base = OTHER; note = 2'-O-methylcytidine
tcttggttacatgaaatcccatc

SEQ ID NO: 96 - RNA, 23 nt, synthetic construct
  source 1..23: mol_type = other RNA
  modified_base 1: mod_base = OTHER; note = 2'-deoxy-2'-fluorouridine-3'-phosphorothioate
  modified_base 2: mod_base = OTHER; note = 2'-deoxy-2'-fluorocytidine-3'-phosphorothioate
  modified_base 3: mod_base = OTHER; note = 2'-O-methyluridine-3'-phosphate
  modified_base 4: mod_base = OTHER; note = 2'-O-methyluridine-3'-phosphate
  modified_base 5: mod_base = OTHER; note = 2'-O-methylguanosine-3'-phosphate
  modified_base 6: mod_base = OTHER; note = 2'-deoxy-2'-fluoroguanosine-3'-phosphate
  modified_base 7: mod_base = OTHER; note = 2'-O-methyluridine-3'-phosphate
  modified_base 8: mod_base = OTHER; note = 2'-O-methyluridine-3'-phosphate
  modified_base 9: mod_base = OTHER; note = 2'-deoxy-2'-fluoroadenosine-3'-phosphate
  modified_base 10: mod_base = OTHER; note = 2'-O-methylcytidine-3'-phosphate
  modified_base 11: mod_base = OTHER; note = 2'-O-methyladenosine-3'-phosphate
  modified_base 12: mod_base = OTHER; note = 2'-O-methyluridine-3'-phosphate
  modified_base 13: mod_base = OTHER; note = 2'-O-methylguanosine-3'-phosphate
  modified_base 14: mod_base = OTHER; note = 2'-deoxy-2'-fluoroadenosine-3'-phosphate
  modified_base 15: mod_base = OTHER; note = 2'-deoxy-2'-fluoroadenosine-3'-phosphate
  modified_base 16: mod_base = OTHER; note = 2'-O-methyladenosine-3'-phosphate
  modified_base 17: mod_base = OTHER; note = 2'-O-methyluridine-3'-phosphate
  modified_base 18: mod_base = OTHER; note = 2'-O-methylcytidine-3'-phosphate
  modified_base 19: mod_base = OTHER; note = 2'-O-methylcytidine-3'-phosphate
  modified_base 20: mod_base = OTHER; note = 2'-O-methylcytidine-3'-phosphate
  modified_base 21: mod_base = OTHER; note = 2'-O-methyladenosine-3'-phosphorothioate
  modified_base 22: mod_base = OTHER; note = 2'-O-methyluridine-3'-phosphorothioate
  modified_base 23: mod_base = OTHER; note = 2'-O-methylcytidine
tcttggttacatgaaatcccatc

SEQ ID NO: 97 - RNA, 23 nt, synthetic construct
  source 1..23: mol_type = other RNA
  modified_base 1: mod_base = OTHER; note = 2'-O-methyluridine-3'-phosphorothioate 5'phosphate
  modified_base 2: mod_base = OTHER; note = 2'-deoxy-2'-fluorocytidine-3'-phosphorothioate
  modified_base 3: mod_base = OTHER; note = 2'-O-methyluridine-3'-phosphate
  modified_base 4: mod_base = OTHER; note = 2'-O-methyluridine-3'-phosphate
  modified_base 5: mod_base = OTHER; note = 2'-O-methylguanosine-3'-phosphate
  modified_base 6: mod_base = OTHER; note = 2'-O-methylguanosine-3'-phosphate
  modified_base 7: mod_base = OTHER; note = 2'-O-methyluridine-3'-phosphate
  modified_base 8: mod_base = OTHER; note = 2'-O-methyluridine-3'-phosphate
  modified_base 9: mod_base = OTHER; note = 2'-O-methyladenosine-3'-phosphate
  modified_base 10: mod_base = OTHER; note = 2'-O-methylcytidine-3'-phosphate
  modified_base 11: mod_base = OTHER; note = 2'-O-methyladenosine-3'-phosphate
  modified_base 12: mod_base = OTHER; note = 2'-O-methyluridine-3'-phosphate
  modified_base 13: mod_base = OTHER; note = 2'-O-methylguanosine-3'-phosphate
  modified_base 14: mod_base = OTHER; note = 2'-deoxy-2'-fluoroadenosine-3'-phosphate
  modified_base 15: mod_base = OTHER; note = 2'-O-methyladenosine-3'-phosphate
  modified_base 16: mod_base = OTHER; note = 2'-O-methyladenosine-3'-phosphate
  modified_base 17: mod_base = OTHER; note = 2'-O-methyluridine-3'-phosphate
  modified_base 18: mod_base = OTHER; note = 2'-O-methylcytidine-3'-phosphate
  modified_base 19: mod_base = OTHER; note = 2'-O-methylcytidine-3'-phosphate
  modified_base 20: mod_base = OTHER; note = 2'-O-methylcytidine-3'-phosphate
  modified_base 21: mod_base = OTHER; note = 2'-O-methyladenosine-3'-phosphorothioate
  modified_base 22: mod_base = OTHER; note = 2'-O-methyluridine-3'-phosphorothioate
  modified_base 23: mod_base = OTHER; note = 2'-O-methylcytidine
tcttggttacatgaaatcccatc

SEQ ID NO: 98 - RNA, 23 nt, synthetic construct
  source 1..23: mol_type = other RNA
  modified_base 1: mod_base = OTHER; note = 2'-deoxy-2'-fluorouridine-3'-phosphorothioate
  modified_base 2: mod_base = OTHER; note = 2'-deoxy-2'-fluorocytidine-3'-phosphorothioate
  modified_base 3: mod_base = OTHER; note = 2'-O-methyluridine-3'-phosphate
  modified_base 4: mod_base = OTHER; note = 2'-O-methyluridine-3'-phosphate
  modified_base 5: mod_base = OTHER; note = 2'-O-methylguanosine-3'-phosphate
  modified_base 6: mod_base = OTHER; note = 2'-deoxy-2'-fluoroguanosine-3'-phosphate
  modified_base 7: mod_base = OTHER; note = 2'-O-methyluridine-3'-phosphate
  modified_base 8: mod_base = OTHER; note = 2'-O-methyluridine-3'-phosphate
  modified_base 9: mod_base = OTHER; note = 2'-O-methyladenosine-3'-phosphate
  modified_base 10: mod_base = OTHER; note = 2'-O-methylcytidine-3'-phosphate
  modified_base 11: mod_base = OTHER; note = 2'-O-methyladenosine-3'-phosphate
  modified_base 12: mod_base = OTHER; note = 2'-O-methyluridine-3'-phosphate
  modified_base 13: mod_base = OTHER; note = 2'-O-methylguanosine-3'-phosphate
  modified_base 14: mod_base = OTHER; note = 2'-deoxy-2'-fluoroadenosine-3'-phosphate
  modified_base 15: mod_base = OTHER; note = 2'-O-methyladenosine-3'-phosphate
  modified_base 16: mod_base = OTHER; note = 2'-deoxy-2'-fluoroadenosine-3'-phosphate
  modified_base 17: mod_base = OTHER; note = 2'-O-methyluridine-3'-phosphate
  modified_base 18: mod_base = OTHER; note = 2'-O-methylcytidine-3'-phosphate
  modified_base 19: mod_base = OTHER; note = 2'-O-methylcytidine-3'-phosphate
  modified_base 20: mod_base = OTHER; note = 2'-O-methylcytidine-3'-phosphate
  modified_base 21: mod_base = OTHER; note = 2'-O-methyladenosine-3'-phosphorothioate
  modified_base 22: mod_base = OTHER; note = 2'-O-methyluridine-3'-phosphorothioate
  modified_base 23: mod_base = OTHER; note = 2'-O-methylcytidine
tcttggttacatgaaatcccatc

SEQ ID NO: 99 - RNA, 23 nt, synthetic construct
  source 1..23: mol_type = other RNA
  modified_base 1: mod_base = OTHER; note = 2'-O-methyluridine-3'-phosphorothioate
  modified_base 2: mod_base = OTHER; note = 2'-deoxy-2'-fluorocytidine-3'-phosphorothioate
  modified_base 3: mod_base = OTHER; note = 2'-O-methyluridine-3'-phosphate
  modified_base 4: mod_base = OTHER; note = 2'-O-methyluridine-3'-phosphate
  modified_base 5: mod_base = OTHER; note = 2'-O-methylguanosine-3'-phosphate
  modified_base 6: mod_base = OTHER; note = 2'-O-methylguanosine-3'-phosphate
  modified_base 7: mod_base = OTHER; note = 2'-O-methyluridine-3'-phosphate
  modified_base 8: mod_base = OTHER; note = 2'-O-methyluridine-3'-phosphate
  modified_base 9: mod_base = OTHER; note = 2'-O-methyladenosine-3'-phosphate
  modified_base 10: mod_base = OTHER; note = 2'-O-methylcytidine-3'-phosphate
  modified_base 11: mod_base = OTHER; note = 2'-O-methyladenosine-3'-phosphate
  modified_base 12: mod_base = OTHER; note = 2'-O-methyluridine-3'-phosphate
  modified_base 13: mod_base = OTHER; note = 2'-O-methylguanosine-3'-phosphate
  modified_base 14: mod_base = OTHER; note = 2'-deoxy-2'-fluoroadenosine-3'-phosphate
  modified_base 15: mod_base = OTHER; note = 2'-O-methyladenosine-3'-phosphate
  modified_base 16: mod_base = OTHER; note = 2'-O-methyladenosine-3'-phosphate
  modified_base 17: mod_base = OTHER; note = 2'-O-methyluridine-3'-phosphate
  modified_base 18: mod_base = OTHER; note = 2'-O-methylcytidine-3'-phosphate
  modified_base 19: mod_base = OTHER; note = 2'-O-methylcytidine-3'-phosphate
  modified_base 20: mod_base = OTHER; note = 2'-O-methylcytidine-3'-phosphate
  modified_base 21: mod_base = OTHER; note = 2'-O-methyladenosine-3'-phosphorothioate
  modified_base 22: mod_base = OTHER; note = 2'-O-methyluridine-3'-phosphorothioate
  modified_base 23: mod_base = OTHER; note = 2'-O-methylcytidine
tcttggttacatgaaatcccatc

SEQ ID NO: 100 - RNA, 23 nt, synthetic construct
  source 1..23: mol_type = other RNA
  modified_base 1: mod_base = OTHER; note = 2'-O-methyluridine-3'-phosphorothioate
  modified_base 2: mod_base = OTHER; note = 2'-deoxy-2'-fluorocytidine-3'-phosphorothioate
  modified_base 3: mod_base = OTHER; note = 2'-O-methyluridine-3'-phosphate
  modified_base 4: mod_base = OTHER; note = 2'-O-methyluridine-3'-phosphate
  modified_base 5: mod_base = OTHER; note = 2'-O-methylguanosine-3'-phosphate
  modified_base 6: mod_base = OTHER; note = 2'-deoxy-2'-fluoroguanosine-3'-phosphate
  modified_base 7: mod_base = OTHER; note = 2'-O-methyluridine-3'-phosphate
  modified_base 8: mod_base = OTHER; note = 2'-deoxy-2'-fluorouridine-3'-phosphate
  modified_base 9: mod_base = OTHER; note = 2'-deoxy-2'-fluoroadenosine-3'-phosphate
  modified_base 10: mod_base = OTHER; note = 2'-O-methylcytidine-3'-phosphate
  modified_base 11: mod_base = OTHER; note = 2'-O-methyladenosine-3'-phosphate
  modified_base 12: mod_base = OTHER; note = 2'-O-methyluridine-3'-phosphate
  modified_base 13: mod_base = OTHER; note = 2'-O-methylguanosine-3'-phosphate
  modified_base 14: mod_base = OTHER; note = 2'-deoxy-2'-fluoroadenosine-3'-phosphate
  modified_base 15: mod_base = OTHER; note = 2'-O-methyladenosine-3'-phosphate
  modified_base 16: mod_base = OTHER; note = 2'-deoxy-2'-fluoroadenosine-3'-phosphate
  modified_base 17: mod_base = OTHER; note = 2'-O-methyluridine-3'-phosphate
  modified_base 18: mod_base = OTHER; note = 2'-O-methylcytidine-3'-phosphate
  modified_base 19: mod_base = OTHER; note = 2'-O-methylcytidine-3'-phosphate
  modified_base 20: mod_base = OTHER; note = 2'-O-methylcytidine-3'-phosphate
  modified_base 21: mod_base = OTHER; note = 2'-O-methyladenosine-3'-phosphorothioate
  modified_base 22: mod_base = OTHER; note = 2'-O-methyluridine-3'-phosphorothioate
  modified_base 23: mod_base = OTHER; note = 2'-O-methylcytidine
tcttggttacatgaaatcccatc

SEQ ID NO: 101 - RNA, 23 nt, synthetic construct
  source 1..23: mol_type = other RNA
  modified_base 1: mod_base = OTHER; note = 2'-O-methyluridine-3'-phosphorothioate
  modified_base 2: mod_base = OTHER; note = 2'-deoxy-2'-fluorocytidine-3'-phosphorothioate
  modified_base 3: mod_base = OTHER; note = 2'-O-methyluridine-3'-phosphate
  modified_base 4: mod_base = OTHER; note = 2'-O-methyluridine-3'-phosphate
  modified_base 5: mod_base = OTHER; note = 2'-O-methylguanosine-3'-phosphate
  modified_base 6: mod_base = OTHER; note = 2'-deoxy-2'-fluoroguanosine-3'-phosphate
  modified_base 7: mod_base = OTHER; note = 2'-O-methyluridine-3'-phosphate
  modified_base 8: mod_base = OTHER; note = 2'-O-methyluridine-3'-phosphate
  modified_base 9: mod_base = OTHER; note = 2'-O-methyladenosine-3'-phosphate
  modified_base 10: mod_base = OTHER; note = 2'-O-methylcytidine-3'-phosphate
  modified_base 11: mod_base = OTHER; note = 2'-O-methyladenosine-3'-phosphate
  modified_base 12: mod_base = OTHER; note = 2'-O-methyluridine-3'-phosphate
  modified_base 13: mod_base = OTHER; note = 2'-O-methylguanosine-3'-phosphate
  modified_base 14: mod_base = OTHER; note = 2'-deoxy-2'-fluoroadenosine-3'-phosphate
  modified_base 15: mod_base = OTHER; note = 2'-O-methyladenosine-3'-phosphate
  modified_base 16: mod_base = OTHER; note = 2'-deoxy-2'-fluoroadenosine-3'-phosphate
  modified_base 17: mod_base = OTHER; note = 2'-O-methyluridine-3'-phosphate
  modified_base 18: mod_base = OTHER; note = 2'-O-methylcytidine-3'-phosphate
  modified_base 19: mod_base = OTHER; note = 2'-O-methylcytidine-3'-phosphate
  modified_base 20: mod_base = OTHER; note = 2'-O-methyluridine-3'-phosphate
  modified_base 21: mod_base = OTHER; note = 2'-O-methyladenosine-3'-phosphorothioate
  modified_base 22: mod_base = OTHER; note = 2'-O-methyluridine-3'-phosphorothioate
  modified_base 23: mod_base = OTHER; note = 2'-O-methyluridine
tcttggttacatgaaatcctatt

SEQ ID NO: 102 - RNA, 23 nt, synthetic construct
  source 1..23: mol_type = other RNA
  modified_base 1: mod_base = OTHER; note = 2'-O-methyluridine-3'-phosphorothioate
  modified_base 2: mod_base = OTHER; note = 2'-deoxy-2'-fluorocytidine-3'-phosphorothioate
  modified_base 3: mod_base = OTHER; note = 2'-O-methyluridine-3'-phosphate
  modified_base 4: mod_base = OTHER; note = 2'-O-methyluridine-3'-phosphate
  modified_base 5: mod_base = OTHER; note = 2'-O-methylguanosine-3'-phosphate
  modified_base 6: mod_base = OTHER; note = 2'-deoxy-2'-fluoroguanosine-3'-phosphate
  modified_base 7: mod_base = OTHER; note = 2'-O-methyluridine-3'-phosphate
  modified_base 8: mod_base = OTHER; note = 2'-deoxy-2'-fluorouridine-3'-phosphate
  modified_base 9: mod_base = OTHER; note = 2'-deoxy-2'-fluoroadenosine-3'-phosphate
  modified_base 10: mod_base = OTHER; note = 2'-O-methylcytidine-3'-phosphate
  modified_base 11: mod_base = OTHER; note = 2'-O-methyladenosine-3'-phosphate
  modified_base 12: mod_base = OTHER; note = 2'-O-methyluridine-3'-phosphate
  modified_base 13: mod_base = OTHER; note = 2'-O-methylguanosine-3'-phosphate
  modified_base 14: mod_base = OTHER; note = 2'-deoxy-2'-fluoroadenosine-3'-phosphate
  modified_base 15: mod_base = OTHER; note = 2'-O-methyladenosine-3'-phosphate
  modified_base 16: mod_base = OTHER; note = 2'-deoxy-2'-fluoroadenosine-3'-phosphate
  modified_base 17: mod_base = OTHER; note = 2'-O-methyluridine-3'-phosphate
  modified_base 18: mod_base = OTHER; note = 2'-O-methylcytidine-3'-phosphate
  modified_base 19: mod_base = OTHER; note = 2'-O-methylcytidine-3'-phosphate
  modified_base 20: mod_base = OTHER; note = 2'-O-methylcytidine-3'-phosphate
  modified_base 21: mod_base = OTHER; note = 2'-O-methyladenosine-3'-phosphorothioate
  modified_base 22: mod_base = OTHER; note = 2'-O-methyluridine-3'-phosphorothioate
  modified_base 23: mod_base = OTHER; note = 2'-O-methylcytidine
tcttggttacatgaaatcccatc

SEQ ID NO: 103 - RNA, 23 nt, synthetic construct
  source 1..23: mol_type = other RNA
  modified_base 1: mod_base = OTHER; note = 2'-O-methyluridine-3'-phosphorothioate
  modified_base 2: mod_base = OTHER; note = 2'-deoxy-2'-fluorocytidine-3'-phosphorothioate
  modified_base 3: mod_base = OTHER; note = 2'-O-methyluridine-3'-phosphate
  modified_base 4: mod_base = OTHER; note = 2'-O-methyluridine-3'-phosphate
  modified_base 5: mod_base = OTHER; note = 2'-O-methylguanosine-3'-phosphate
  modified_base 6: mod_base = OTHER; note = 2'-O-methylguanosine-3'-phosphate
  modified_base 7: mod_base = OTHER; note = 2'-O-methyluridine-3'-phosphate
  modified_base 8: mod_base = OTHER; note = 2'-O-methyluridine-3'-phosphate
  modified_base 9: mod_base = OTHER; note = 2'-O-methyladenosine-3'-phosphate
  modified_base 10: mod_base = OTHER; note = 2'-O-methylcytidine-3'-phosphate
  modified_base 11: mod_base = OTHER; note = 2'-O-methyladenosine-3'-phosphate
  modified_base 12: mod_base = OTHER; note = 2'-O-methyluridine-3'-phosphate
  modified_base 13: mod_base = OTHER; note = 2'-O-methylguanosine-3'-phosphate
  modified_base 14: mod_base = OTHER; note = 2'-deoxy-2'-fluoroadenosine-3'-phosphate
  modified_base 15: mod_base = OTHER; note = 2'-O-methyladenosine-3'-phosphate
  modified_base 16: mod_base = OTHER; note = 2'-O-methyladenosine-3'-phosphate
  modified_base 17: mod_base = OTHER; note = 2'-O-methyluridine-3'-phosphate
  modified_base 18: mod_base = OTHER; note = 2'-O-methylcytidine-3'-phosphate
  modified_base 19: mod_base = OTHER; note = 2'-O-methylcytidine-3'-phosphate
  modified_base 20: mod_base = OTHER; note = 2'-O-methylcytidine-3'-phosphate
  modified_base 21: mod_base = OTHER; note = 2'-O-methyladenosine-3'-phosphorothioate
  modified_base 22: mod_base = OTHER; note = 2'-O-methyluridine-3'-phosphorothioate
  modified_base 23: mod_base = OTHER; note = 2'-O-methylcytidine
tcttggttacatgaaatcccatc

SEQ ID NO: 104 - RNA, 23 nt, synthetic construct
  source 1..23: mol_type = other RNA
  modified_base 1: mod_base = OTHER; note = 2'-O-methyluridine-3'-phosphorothioate
  modified_base 2: mod_base = OTHER; note = 2'-deoxy-2'-fluorocytidine-3'-phosphorothioate
  modified_base 3: mod_base = OTHER; note = 2'-O-methyluridine-3'-phosphate
  modified_base 4: mod_base = OTHER; note = 2'-O-methyluridine-3'-phosphate
  modified_base 5: mod_base = OTHER; note = 2'-O-methylguanosine-3'-phosphate
  modified_base 6: mod_base = OTHER; note = 2'-O-methylguanosine-3'-phosphate
  modified_base 7: mod_base = OTHER; note = 2'-O-methyluridine-3'-phosphate
  modified_base 8: mod_base = OTHER; note = 2'-O-methyluridine-3'-phosphate
  modified_base 9: mod_base = OTHER; note = 2'-O-methyladenosine-3'-phosphate
  modified_base 10: mod_base = OTHER; note = 2'-O-methylcytidine-3'-phosphate
  modified_base 11: mod_base = OTHER; note = 2'-O-methyladenosine-3'-phosphate
  modified_base 12: mod_base = OTHER; note = 2'-O-methyluridine-3'-phosphate
  modified_base 13: mod_base = OTHER; note = 2'-O-methylguanosine-3'-phosphate
  modified_base 14: mod_base = OTHER; note = 2'-deoxy-2'-fluoroadenosine-3'-phosphate
  modified_base 15: mod_base = OTHER; note = 2'-O-methyladenosine-3'-phosphate
  modified_base 16: mod_base = OTHER; note = 2'-O-methyladenosine-3'-phosphate
  modified_base 17: mod_base = OTHER; note = 2'-O-methyluridine-3'-phosphate
  modified_base 18: mod_base = OTHER; note = 2'-O-methylcytidine-3'-phosphate
  modified_base 19: mod_base = OTHER; note = 2'-O-methylcytidine-3'-phosphate
  modified_base 20: mod_base = OTHER; note = 2'-O-methylcytidine-3'-phosphate
  modified_base 21: mod_base = OTHER; note = 2'-O-methyladenosine-3'-phosphorothioate
  modified_base 22: mod_base = OTHER; note = 2'-O-methyluridine-3'-phosphorothioate
  modified_base 23: mod_base = OTHER; note = 2'-O-methylcytidine
tcttggttacatgaaatcccatc

SEQ ID NO: 105 - RNA, 21 nt, synthetic construct
  source 1..21: mol_type = other RNA
  modified_base 1: mod_base = OTHER; note = 2'-O-methyluridine-3'-phosphorothioate
  modified_base 2: mod_base = OTHER; note = 2'-deoxy-2'-fluorocytidine-3'-phosphorothioate
  modified_base 3: mod_base = OTHER; note = 2'-O-methyluridine-3'-phosphate
  modified_base 4: mod_base = OTHER; note = 2'-O-methyluridine-3'-phosphate
  modified_base 5: mod_base = OTHER; note = 2'-O-methylguanosine-3'-phosphate
  modified_base 6: mod_base = OTHER; note = 2'-O-methylguanosine-3'-phosphate
  modified_base 7: mod_base = OTHER; note = 2'-O-methyluridine-3'-phosphate
  modified_base 8: mod_base = OTHER; note = 2'-O-methyluridine-3'-phosphate
  modified_base 9: mod_base = OTHER; note = 2'-O-methyladenosine-3'-phosphate
  modified_base 10: mod_base = OTHER; note = 2'-O-methylcytidine-3'-phosphate
  modified_base 11: mod_base = OTHER; note = 2'-O-methyladenosine-3'-phosphate
  modified_base 12: mod_base = OTHER; note = 2'-O-methyluridine-3'-phosphate
  modified_base 13: mod_base = OTHER; note = 2'-O-methylguanosine-3'-phosphate
  modified_base 14: mod_base = OTHER; note = 2'-deoxy-2'-fluoroadenosine-3'-phosphate
  modified_base 15: mod_base = OTHER; note = 2'-O-methyladenosine-3'-phosphate
  modified_base 16: mod_base = OTHER; note = 2'-O-methyladenosine-3'-phosphate
  modified_base 17: mod_base = OTHER; note = 2'-O-methyluridine-3'-phosphate
  modified_base 18: mod_base = OTHER; note = 2'-O-methylcytidine-3'-phosphate
  modified_base 19: mod_base = OTHER; note = 2'-O-methylcytidine-3'-phosphorothioate
  modified_base 20: mod_base = OTHER; note = 2'-O-methylcytidine-3'-phosphorothioate
  modified_base 21: mod_base = OTHER; note = 2'-O-methyladenosine
tcttggttacatgaaatccca

SEQ ID NO: 106 - RNA, 23 nt, synthetic construct
  source 1..23: mol_type = other RNA
  modified_base 1: mod_base = OTHER; note = 2'-O-methyluridine-3'-phosphorothioate
  modified_base 2: mod_base = OTHER; note = 2'-deoxy-2'-fluorocytidine-3'-phosphorothioate
  modified_base 3: mod_base = OTHER; note = 2'-O-methyluridine-3'-phosphate
  modified_base 4: mod_base = OTHER; note = 2'-O-methyluridine-3'-phosphate
  modified_base 5: mod_base = OTHER; note = 2'-O-methylguanosine-3'-phosphate
  modified_base 6: mod_base = OTHER; note = 2'-deoxy-2'-fluoroguanosine-3'-phosphate
  modified_base 7: mod_base = OTHER; note = 2'-O-methyluridine-3'-phosphate
  modified_base 8: mod_base = OTHER; note = 2'-O-methyluridine-3'-phosphate
  modified_base 9: mod_base = OTHER; note = 2'-deoxy-2'-fluoroadenosine-3'-phosphate
  modified_base 10: mod_base = OTHER; note = 2'-O-methylcytidine-3'-phosphate
  modified_base 11: mod_base = OTHER; note = 2'-O-methyladenosine-3'-phosphate
  modified_base 12: mod_base = OTHER; note = 2'-O-methyluridine-3'-phosphate
  modified_base 13: mod_base = OTHER; note = 2'-O-methylguanosine-3'-phosphate
  modified_base 14: mod_base = OTHER; note = 2'-deoxy-2'-fluoroadenosine-3'-phosphate
  modified_base 15: mod_base = OTHER; note = 2'-deoxy-2'-fluoroadenosine-3'-phosphate
  modified_base 16: mod_base = OTHER; note = 2'-O-methyladenosine-3'-phosphate
  modified_base 17: mod_base = OTHER; note = 2'-O-methyluridine-3'-phosphate
  modified_base 18: mod_base = OTHER; note = 2'-O-methylcytidine-3'-phosphate
  modified_base 19: mod_base = OTHER; note = 2'-O-methylcytidine-3'-phosphate
  modified_base 20: mod_base = OTHER; note = 2'-O-methylcytidine-3'-phosphate
  modified_base 21: mod_base = OTHER; note = 2'-O-methyladenosine-3'-phosphorothioate
  modified_base 22: mod_base = OTHER; note = 2'-O-methyluridine-3'-phosphorothioate
  modified_base 23: mod_base = OTHER; note = 2'-O-methylcytidine
tcttggttacatgaaatcccatc

SEQ ID NO: 107 - RNA, 23 nt, synthetic construct
  source 1..23: mol_type = other RNA
  modified_base 1: mod_base = OTHER; note = 2'-O-methyluridine-3'-phosphorothioate
  modified_base 2: mod_base = OTHER; note = 2'-deoxy-2'-fluorocytidine-3'-phosphate
  modified_base 3: mod_base = OTHER; note = 2'-O-methyluridine-3'-phosphate
  modified_base 4: mod_base = OTHER; note = 2'-O-methyluridine-3'-phosphate
  modified_base 5: mod_base = OTHER; note = 2'-O-methylguanosine-3'-phosphate
  modified_base 6: mod_base = OTHER; note = 2'-deoxy-2'-fluoroguanosine-3'-phosphate
  modified_base 7: mod_base = OTHER; note = 2'-O-methyluridine-3'-phosphate
  modified_base 8: mod_base = OTHER; note = 2'-deoxy-2'-fluorouridine-3'-phosphate
  modified_base 9: mod_base = OTHER; note = 2'-deoxy-2'-fluoroadenosine-3'-phosphate
  modified_base 10: mod_base = OTHER; note = 2'-O-methylcytidine-3'-phosphate
  modified_base 11: mod_base = OTHER; note = 2'-O-methyladenosine-3'-phosphate
  modified_base 12: mod_base = OTHER; note = 2'-O-methyluridine-3'-phosphate
  modified_base 13: mod_base = OTHER; note = 2'-O-methylguanosine-3'-phosphate
  modified_base 14: mod_base = OTHER; note = 2'-deoxy-2'-fluoroadenosine-3'-phosphate
  modified_base 15: mod_base = OTHER; note = 2'-O-methyladenosine-3'-phosphate
  modified_base 16: mod_base = OTHER; note = 2'-deoxy-2'-fluoroadenosine-3'-phosphate
  modified_base 17: mod_base = OTHER; note = 2'-O-methyluridine-3'-phosphate
  modified_base 18: mod_base = OTHER; note = 2'-O-methylcytidine-3'-phosphate
  modified_base 19: mod_base = OTHER; note = 2'-O-methylcytidine-3'-phosphate
  modified_base 20: mod_base = OTHER; note = 2'-O-methylcytidine-3'-phosphate
  modified_base 21: mod_base = OTHER; note = 2'-O-methyladenosine-3'-phosphorothioate
  modified_base 22: mod_base = OTHER; note = 2'-O-methyluridine-3'-phosphorothioate
  modified_base 23: mod_base = OTHER; note = 2'-O-methylcytidine
tcttggttacatgaaatcccatc

SEQ ID NO: 108 - RNA, 23 nt, synthetic construct
  source 1..23: mol_type = other RNA
  modified_base 1: mod_base = OTHER; note = 2'-O-methyluridine-3'-phosphorothioate
  modified_base 2: mod_base = OTHER; note = 2'-deoxy-2'-fluorocytidine-3'-phosphate
  modified_base 3: mod_base = OTHER; note = 2'-O-methyluridine-3'-phosphate
  modified_base 4: mod_base = OTHER; note = 2'-O-methyluridine-3'-phosphate
  modified_base 5: mod_base = OTHER; note = 2'-O-methylguanosine-3'-phosphate
  modified_base 6: mod_base = OTHER; note = 2'-deoxy-2'-fluoroguanosine-3'-phosphate
  modified_base 7: mod_base = OTHER; note = 2'-O-methyluridine-3'-phosphate
  modified_base 8: mod_base = OTHER; note = 2'-O-methyluridine-3'-phosphate
  modified_base 9: mod_base = OTHER; note = 2'-O-methyladenosine-3'-phosphate
  modified_base 10: mod_base = OTHER; note = 2'-O-methylcytidine-3'-phosphate
  modified_base 11: mod_base = OTHER; note = 2'-O-methyladenosine-3'-phosphate
  modified_base 12: mod_base = OTHER; note = 2'-O-methyluridine-3'-phosphate
  modified_base 13: mod_base = OTHER; note = 2'-O-methylguanosine-3'-phosphate
  modified_base 14: mod_base = OTHER; note = 2'-deoxy-2'-fluoroadenosine-3'-phosphate
  modified_base 15: mod_base = OTHER; note = 2'-O-methyladenosine-3'-phosphate
  modified_base 16: mod_base = OTHER; note = 2'-deoxy-2'-fluoroadenosine-3'-phosphate
  modified_base 17: mod_base = OTHER; note = 2'-O-methyluridine-3'-phosphate
  modified_base 18: mod_base = OTHER; note = 2'-O-methylcytidine-3'-phosphate
  modified_base 19: mod_base = OTHER; note = 2'-O-methylcytidine-3'-phosphate
  modified_base 20: mod_base = OTHER; note = 2'-O-methylcytidine-3'-phosphate
  modified_base 21: mod_base = OTHER; note = 2'-O-methyladenosine-3'-phosphorothioate
  modified_base 22: mod_base = OTHER; note = 2'-O-methyluridine-3'-phosphorothioate
  modified_base 23: mod_base = OTHER; note = 2'-O-methylcytidine
tcttggttacatgaaatcccatc

SEQ ID NO: 109 - RNA, 23 nt, synthetic construct
  source 1..23: mol_type = other RNA
  modified_base 1: mod_base = OTHER; note = 2'-O-methyluridine-3'-phosphorothioate
  modified_base 2: mod_base = OTHER; note = 2'-deoxy-2'-fluorocytidine-3'-phosphorothioate
  modified_base 3: mod_base = OTHER; note = 2'-O-methyluridine-3'-phosphate
  modified_base 4: mod_base = OTHER; note = 2'-O-methyluridine-3'-phosphate
  modified_base 5: mod_base = OTHER; note = 2'-O-methylguanosine-3'-phosphate
  modified_base 6: mod_base = OTHER; note = 2'-deoxy-2'-fluoroguanosine-3'-phosphate
  modified_base 7: mod_base = OTHER; note = 2'-O-methyluridine-3'-phosphate
  modified_base 8: mod_base = OTHER; note = 2'-O-methyluridine-3'-phosphate
  modified_base 9: mod_base = OTHER; note = 2'-O-methyladenosine-3'-phosphate
  modified_base 10: mod_base = OTHER; note = 2'-O-methylcytidine-3'-phosphate
  modified_base 11: mod_base = OTHER; note = 2'-O-methyladenosine-3'-phosphate
  modified_base 12: mod_base = OTHER; note = 2'-O-methyluridine-3'-phosphate
  modified_base 13: mod_base = OTHER; note = 2'-O-methylguanosine-3'-phosphate
  modified_base 14: mod_base = OTHER; note = 2'-deoxy-2'-fluoroadenosine-3'-phosphate
  modified_base 15: mod_base = OTHER; note = 2'-O-methyladenosine-3'-phosphate
  modified_base 16: mod_base = OTHER; note = 2'-deoxy-2'-fluoroadenosine-3'-phosphate
  modified_base 17: mod_base = OTHER; note = 2'-O-methyluridine-3'-phosphate
  modified_base 18: mod_base = OTHER; note = 2'-O-methylcytidine-3'-phosphate
  modified_base 19: mod_base = OTHER; note = 2'-O-methylcytidine-3'-phosphate
  modified_base 20: mod_base = OTHER; note = 2'-O-methylcytidine-3'-phosphate
  modified_base 21: mod_base = OTHER; note = 2'-O-methyladenosine-3'-phosphorothioate
  modified_base 22: mod_base = OTHER; note = 2'-O-methyluridine-3'-phosphorothioate
  modified_base 23: mod_base = OTHER; note = 2'-O-methylcytidine
tcttggttacatgaaatcccatc

SEQ ID NO: 110 - RNA, 21 nt, synthetic construct
  source 1..21: mol_type = other RNA
  modified_base 1: mod_base = OTHER; note = 2'-O-methyluridine-3'-phosphorothioate
  modified_base 2: mod_base = OTHER; note = 2'-deoxy-2'-fluorocytidine-3'-phosphorothioate
  modified_base 3: mod_base = OTHER; note = 2'-O-methyluridine-3'-phosphate
  modified_base 4: mod_base = OTHER; note = 2'-O-methyluridine-3'-phosphate
  modified_base 5: mod_base = OTHER; note = 2'-O-methylguanosine-3'-phosphate
  modified_base 6: mod_base = OTHER; note = 2'-O-methylguanosine-3'-phosphate
  modified_base 7: mod_base = OTHER; note = 2'-O-methyluridine-3'-phosphate
  modified_base 8: mod_base = OTHER; note = 2'-O-methyluridine-3'-phosphate
  modified_base 9: mod_base = OTHER; note = 2'-O-methyladenosine-3'-phosphate
  modified_base 10: mod_base = OTHER; note = 2'-O-methylcytidine-3'-phosphate
  modified_base 11: mod_base = OTHER; note = 2'-O-methyladenosine-3'-phosphate
  modified_base 12: mod_base = OTHER; note = 2'-O-methyluridine-3'-phosphate
  modified_base 13: mod_base = OTHER; note = 2'-O-methylguanosine-3'-phosphate
  modified_base 14: mod_base = OTHER; note = 2'-deoxy-2'-fluoroadenosine-3'-phosphate
  modified_base 15: mod_base = OTHER; note = 2'-O-methyladenosine-3'-phosphate
  modified_base 16: mod_base = OTHER; note = 2'-O-methyladenosine-3'-phosphate
  modified_base 17: mod_base = OTHER; note = 2'-O-methyluridine-3'-phosphate
  modified_base 18: mod_base = OTHER; note = 2'-O-methylcytidine-3'-phosphate
  modified_base 19: mod_base = OTHER; note = 2'-O-methylcytidine-3'-phosphorothioate
  modified_base 20: mod_base = OTHER; note = 2'-O-methyluridine-3'-phosphorothioate
  modified_base 21: mod_base = OTHER; note = 2'-O-methyladenosine
tcttggttacatgaaatccta

SEQ ID NO: 111 - RNA, 21 nt, synthetic construct
  source 1..21: mol_type = other RNA
  modified_base 1: mod_base = OTHER; note = 2'-O-methyluridine-3'-phosphorothioate
  modified_base 2: mod_base = OTHER; note = 2'-deoxy-2'-fluorocytidine-3'-phosphate
  modified_base 3: mod_base = OTHER; note = 2'-O-methyluridine-3'-phosphate
  modified_base 4: mod_base = OTHER; note = 2'-O-methyluridine-3'-phosphate
  modified_base 5: mod_base = OTHER; note = 2'-O-methylguanosine-3'-phosphate
  modified_base 6: mod_base = OTHER; note = 2'-O-methylguanosine-3'-phosphate
  modified_base 7: mod_base = OTHER; note = 2'-O-methyluridine-3'-phosphate
  modified_base 8: mod_base = OTHER; note = 2'-O-methyluridine-3'-phosphate
  modified_base 9: mod_base = OTHER; note = 2'-O-methyladenosine-3'-phosphate
  modified_base 10: mod_base = OTHER; note = 2'-O-methylcytidine-3'-phosphate
  modified_base 11: mod_base = OTHER; note = 2'-O-methyladenosine-3'-phosphate
  modified_base 12: mod_base = OTHER; note = 2'-O-methyluridine-3'-phosphate
  modified_base 13: mod_base = OTHER; note = 2'-O-methylguanosine-3'-phosphate
  modified_base 14: mod_base = OTHER; note = 2'-deoxy-2'-fluoroadenosine-3'-phosphate
  modified_base 15: mod_base = OTHER; note = 2'-O-methyladenosine-3'-phosphate
  modified_base 16: mod_base = OTHER; note = 2'-O-methyladenosine-3'-phosphate
  modified_base 17: mod_base = OTHER; note = 2'-O-methyluridine-3'-phosphate
  modified_base 18: mod_base = OTHER; note = 2'-O-methylcytidine-3'-phosphate
  modified_base 19: mod_base = OTHER; note = 2'-O-methylcytidine-3'-phosphorothioate
  modified_base 20: mod_base = OTHER; note = 2'-O-methylcytidine-3'-phosphorothioate
  modified_base 21: mod_base = OTHER; note = 2'-O-methyladenosine
tcttggttacatgaaatccca

SEQ ID NO: 112 - RNA, 23 nt, synthetic construct
  source 1..23: mol_type = other RNA
  modified_base 1: mod_base = OTHER; note = 2'-O-methyluridine-3'-phosphorothioate
  modified_base 2: mod_base = OTHER; note = 2'-deoxy-2'-fluorocytidine-3'-phosphorothioate
  modified_base 3: mod_base = OTHER; note = 2'-O-methyluridine-3'-phosphate
  modified_base 4: mod_base = OTHER; note = 2'-O-methyluridine-3'-phosphate
  modified_base 5: mod_base = OTHER; note = 2'-O-methylguanosine-3'-phosphate
  modified_base 6: mod_base = OTHER; note = 2'-deoxy-2'-fluoroguanosine-3'-phosphate
  modified_base 7: mod_base = OTHER; note = 2'-O-methyluridine-3'-phosphate
  modified_base 8: mod_base = OTHER; note = 2'-O-methyluridine-3'-phosphate
  modified_base 9: mod_base = OTHER; note = 2'-O-methyladenosine-3'-phosphate
  modified_base 10: mod_base = OTHER; note = 2'-O-methylcytidine-3'-phosphate
  modified_base 11: mod_base = OTHER; note = 2'-O-methyladenosine-3'-phosphate
  modified_base 12: mod_base = OTHER; note = 2'-O-methyluridine-3'-phosphate
  modified_base 13: mod_base = OTHER; note = 2'-O-methylguanosine-3'-phosphate
  modified_base 14: mod_base = OTHER; note = 2'-deoxy-2'-fluoroadenosine-3'-phosphate
  modified_base 15: mod_base = OTHER; note = 2'-O-methyladenosine-3'-phosphate
  modified_base 16: mod_base = OTHER; note = 2'-deoxy-2'-fluoroadenosine-3'-phosphate
  modified_base 17: mod_base = OTHER; note = 2'-O-methyluridine-3'-phosphate
  modified_base 18: mod_base = OTHER; note = 2'-O-methylcytidine-3'-phosphate
  modified_base 19: mod_base = OTHER; note = 2'-O-methylcytidine-3'-phosphate
  modified_base 20: mod_base = OTHER; note = 2'-O-methylcytidine-3'-phosphate
  modified_base 21: mod_base = OTHER; note = 2'-O-methyladenosine-3'-phosphorothioate
  modified_base 22: mod_base = OTHER; note = 2'-O-methyluridine-3'-phosphorothioate
  modified_base 23: mod_base = OTHER; note = 2'-O-methylcytidine
tcttggttacatgaaatcccatc

SEQ ID NO: 113 - RNA, 21 nt, synthetic construct
  source 1..21: mol_type = other RNA
  modified_base 1: mod_base = OTHER; note = 2'-O-methyluridine-3'-phosphorothioate
  modified_base 2: mod_base = OTHER; note = 2'-deoxy-2'-fluorocytidine-3'-phosphorothioate
  modified_base 3: mod_base = OTHER; note = 2'-O-methyluridine-3'-phosphate
  modified_base 4: mod_base = OTHER; note = 2'-O-methyluridine-3'-phosphate
  modified_base 5: mod_base = OTHER; note = 2'-O-methylguanosine-3'-phosphate
  modified_base 6: mod_base = OTHER; note = 2'-O-methylguanosine-3'-phosphate
  modified_base 7: mod_base = OTHER; note = 2'-O-methyluridine-3'-phosphate
  modified_base 8: mod_base = OTHER; note = 2'-O-methyluridine-3'-phosphate
  modified_base 9: mod_base = OTHER; note = 2'-O-methyladenosine-3'-phosphate
  modified_base 10: mod_base = OTHER; note = 2'-O-methylcytidine-3'-phosphate
  modified_base 11: mod_base = OTHER; note = 2'-O-methyladenosine-3'-phosphate
  modified_base 12: mod_base = OTHER; note = 2'-O-methyluridine-3'-phosphate
  modified_base 13: mod_base = OTHER; note = 2'-O-methylguanosine-3'-phosphate
  modified_base 14: mod_base = OTHER; note = 2'-deoxy-2'-fluoroadenosine-3'-phosphate
  modified_base 15: mod_base = OTHER; note = 2'-O-methyladenosine-3'-phosphate
  modified_base 16: mod_base = OTHER; note = 2'-O-methyladenosine-3'-phosphate
  modified_base 17: mod_base = OTHER; note = 2'-O-methyluridine-3'-phosphate
  modified_base 18: mod_base = OTHER; note = 2'-O-methylcytidine-3'-phosphate
  modified_base 19: mod_base = OTHER; note = 2'-O-methylcytidine-3'-phosphorothioate
  modified_base 20: mod_base = OTHER; note = 2'-O-methylcytidine-3'-phosphorothioate
  modified_base 21: mod_base = OTHER; note = 2'-O-methyladenosine
tcttggttacatgaaatccca

SEQ ID NO: 114 - RNA, 23 nt, synthetic construct
  source 1..23: mol_type = other RNA
  modified_base 1: mod_base = OTHER; note = 2'-O-methyluridine-3'-phosphorothioate
  modified_base 2: mod_base = OTHER; note = 2'-deoxy-2'-fluorocytidine-3'-phosphorothioate
  modified_base 3: mod_base = OTHER; note = 2'-O-methyluridine-3'-phosphate
  modified_base 4: mod_base = OTHER; note = 2'-O-methyluridine-3'-phosphate
  modified_base 5: mod_base = OTHER; note = 2'-O-methylguanosine-3'-phosphate
  modified_base 6: mod_base = OTHER; note = 2'-deoxy-2'-fluoroguanosine-3'-phosphate
  modified_base 7: mod_base = OTHER; note = 2'-O-methyluridine-3'-phosphate
  modified_base 8: mod_base = OTHER; note = 2'-O-methyluridine-3'-phosphate
  modified_base 9: mod_base = OTHER; note = 2'-deoxy-2'-fluoroadenosine-3'-phosphate
  modified_base 10: mod_base = OTHER; note = 2'-O-methylcytidine-3'-phosphate
  modified_base 11: mod_base = OTHER; note = 2'-O-methyladenosine-3'-phosphate
  modified_base 12: mod_base = OTHER; note = 2'-O-methyluridine-3'-phosphate
  modified_base 13: mod_base = OTHER; note = 2'-O-methylguanosine-3'-phosphate
  modified_base 14: mod_base = OTHER; note = 2'-deoxy-2'-fluoroadenosine-3'-phosphate
  modified_base 15: mod_base = OTHER; note = 2'-O-methyladenosine-3'-phosphate
  modified_base 16: mod_base = OTHER; note = 2'-deoxy-2'-fluoroadenosine-3'-phosphate
  modified_base 17: mod_base = OTHER; note = 2'-O-methyluridine-3'-phosphate
  modified_base 18: mod_base = OTHER; note = 2'-O-methylcytidine-3'-phosphate
  modified_base 19: mod_base = OTHER; note = 2'-O-methylcytidine-3'-phosphate
  modified_base 20: mod_base = OTHER; note = 2'-O-methylcytidine-3'-phosphate
  modified_base 21: mod_base = OTHER; note = 2'-O-methyladenosine-3'-phosphorothioate
  modified_base 22: mod_base = OTHER; note = 2'-O-methyluridine-3'-phosphorothioate
  modified_base 23: mod_base = OTHER; note = 2'-O-methylcytidine
tcttggttacatgaaatcccatc

SEQ ID NO: 115 - DNA, 23 bp, synthetic construct
  source 1..23: mol_type = other DNA
  modified_base 1: mod_base = OTHER; note = 2'-O-methyluridine-3'-phosphorothioate 5'phosphate
  modified_base 2: mod_base = OTHER; note = 2'-deoxycytidine-3'-phosphorothioate
  modified_base 3: mod_base = OTHER; note = 2'-O-methyluridine-3'-phosphate
  modified_base 4: mod_base = OTHER; note = 2'-O-methyluridine-3'-phosphate
  modified_base 5: mod_base = OTHER; note = 2'-O-methylguanosine-3'-phosphate
  modified_base 6: mod_base = OTHER; note = 2'-O-methylguanosine-3'-phosphate
  modified_base 7: mod_base = OTHER; note = 2'-O-methyluridine-3'-phosphate
  modified_base 8: mod_base = OTHER; note = 2'-O-methyluridine-3'-phosphate
  modified_base 9: mod_base = OTHER; note = 2'-O-methyladenosine-3'-phosphate
  modified_base 11: mod_base = OTHER; note = 2'-O-methyladenosine-3'-phosphate
  modified_base 12: mod_base = OTHER; note = 2'-O-methyluridine-3'-phosphate
  modified_base 13: mod_base = OTHER; note = 2'-O-methylguanosine-3'-phosphate
  modified_base 15: mod_base = OTHER; note = 2'-O-methyladenosine-3'-phosphate
  modified_base 16: mod_base = OTHER; note = 2'-O-methyladenosine-3'-phosphate
  modified_base 17: mod_base = OTHER; note = 2'-O-methyluridine-3'-phosphate
  modified_base 18: mod_base = OTHER; note = 2'-O-methylcytidine-3'-phosphate
  modified_base 19: mod_base = OTHER; note = 2'-O-methylcytidine-3'-phosphate
  modified_base 20: mod_base = OTHER; note = 2'-O-methylcytidine-3'-phosphate
  modified_base 21: mod_base = OTHER; note = 2'-O-methyladenosine-3'-phosphorothioate
  modified_base 22: mod_base = OTHER; note = 2'-O-methyluridine-3'-phosphorothioate
  modified_base 23: mod_base = OTHER; note = 2'-O-methylcytidine
  misc_feature 1: note = RNA
  misc_feature 3..9: note = RNA
  misc_feature 11..13: note = RNA
  misc_feature 15..23: note = RNA
  misc_feature 2: note = DNA
  misc_feature 10: note = DNA
  misc_feature 14: note = DNA
tcttggttacatgaaatcccatc

SEQ ID NO: 116 - DNA, 23 bp, synthetic construct
  source 1..23: mol_type = other DNA
  modified_base 1: mod_base = OTHER; note = 2'-O-methyluridine-3'-phosphorothioate 5'phosphate
  modified_base 2: mod_base = OTHER; note = 2'-deoxycytidine-3'-phosphorothioate
  modified_base 3: mod_base = OTHER; note = 2'-O-methyluridine-3'-phosphate
  modified_base 4: mod_base = OTHER; note = 2'-O-methyluridine-3'-phosphate
  modified_base 5: mod_base = OTHER; note = 2'-O-methylguanosine-3'-phosphate
  modified_base 6: mod_base = OTHER; note = 2'-O-methylguanosine-3'-phosphate
  modified_base 7: mod_base = OTHER; note = 2'-O-methyluridine-3'-phosphate
  modified_base 8: mod_base = OTHER; note = 2'-O-methyluridine-3'-phosphate
  modified_base 9: mod_base = OTHER; note = 2'-O-methyladenosine-3'-phosphate
  modified_base 11: mod_base = OTHER; note = 2'-O-methyladenosine-3'-phosphate
  modified_base 12: mod_base = OTHER; note = 2'-O-methyluridine-3'-phosphate
  modified_base 13: mod_base = OTHER; note = 2'-O-methylguanosine-3'-phosphate
  modified_base 15: mod_base = OTHER; note = 2'-O-methyladenosine-3'-phosphate
  modified_base 16: mod_base = OTHER; note = 2'-O-methyladenosine-3'-phosphate
  modified_base 17: mod_base = OTHER; note = 2'-O-methyluridine-3'-phosphate
  modified_base 18: mod_base = OTHER; note = 2'-O-methylcytidine-3'-phosphate
  modified_base 19: mod_base = OTHER; note = 2'-O-methylcytidine-3'-phosphate
  modified_base 20: mod_base = OTHER; note = 2'-O-methylcytidine-3'-phosphate
  modified_base 21: mod_base = OTHER; note = 2'-O-methyladenosine-3'-phosphorothioate
  modified_base 22: mod_base = OTHER; note = 2'-O-methyluridine-3'-phosphorothioate
  modified_base 23: mod_base = OTHER; note = 2'-O-methylcytidine
  misc_feature 1: note = RNA
  misc_feature 3..9: note = RNA
  misc_feature 11..13: note = RNA
  misc_feature 15..23: note = RNA
  misc_feature 2: note = DNA
  misc_feature 10: note = DNA
  misc_feature 14: note = DNA
tcttggttacatgaaatcccatc

SEQ ID NO: 117 - DNA, 23 bp, synthetic construct
  source 1..23: mol_type = other DNA
  modified_base 1: mod_base = OTHER; note = 2'-O-methyluridine-3'-phosphorothioate
  modified_base 2: mod_base = OTHER; note = 2'-deoxycytidine-3'-phosphorothioate
  modified_base 3: mod_base = OTHER; note = 2'-O-methyluridine-3'-phosphate
  modified_base 4: mod_base = OTHER; note = 2'-O-methyluridine-3'-phosphate
  modified_base 5: mod_base = OTHER; note = 2'-O-methylguanosine-3'-phosphate
  modified_base 6: mod_base = OTHER; note = 2'-O-methylguanosine-3'-phosphate
  modified_base 7: mod_base = OTHER; note = 2'-O-methyluridine-3'-phosphate
  modified_base 8: mod_base = OTHER; note = 2'-O-methyluridine-3'-phosphate
  modified_base 9: mod_base = OTHER; note = 2'-O-methyladenosine-3'-phosphate
  modified_base 11: mod_base = OTHER; note = 2'-O-methyladenosine-3'-phosphate
  modified_base 12: mod_base = OTHER; note = 2'-O-methyluridine-3'-phosphate
  modified_base 13: mod_base = OTHER; note = 2'-O-methylguanosine-3'-phosphate
  modified_base 15: mod_base = OTHER; note = 2'-O-methyladenosine-3'-phosphate
  modified_base 16: mod_base = OTHER; note = 2'-O-methyladenosine-3'-phosphate
  modified_base 17: mod_base = OTHER; note = 2'-O-methyluridine-3'-phosphate
  modified_base 18: mod_base = OTHER; note = 2'-O-methylcytidine-3'-phosphate
  modified_base 19: mod_base = OTHER; note = 2'-O-methylcytidine-3'-phosphate
  modified_base 20: mod_base = OTHER; note = 2'-O-methylcytidine-3'-phosphate
  modified_base 21: mod_base = OTHER; note = 2'-O-methyladenosine-3'-phosphorothioate
  modified_base 22: mod_base = OTHER; note = 2'-O-methyluridine-3'-phosphorothioate
  modified_base 23: mod_base = OTHER; note = 2'-O-methylcytidine
  misc_feature 1: note = RNA
  misc_feature 3..9: note = RNA
  misc_feature 11..13: note = RNA
  misc_feature 15..23: note = RNA
  misc_feature 2: note = DNA
  misc_feature 10: note = DNA
  misc_feature 14: note = DNA
tcttggttacatgaaatcccatc

SEQ ID NO: 118 - DNA, 23 bp, synthetic construct
  source 1..23: mol_type = other DNA
  modified_base 1: mod_base = OTHER; note = 2'-deoxy-2'-fluorouridine-3'-phosphorothioate
  modified_base 2: mod_base = OTHER; note = 2'-deoxycytidine-3'-phosphorothioate
  modified_base 3: mod_base = OTHER; note = 2'-O-methyluridine-3'-phosphate
  modified_base 4: mod_base = OTHER; note = 2'-O-methyluridine-3'-phosphate
  modified_base 5: mod_base = OTHER; note = 2'-O-methylguanosine-3'-phosphate
  modified_base 6: mod_base = OTHER; note = 2'-O-methylguanosine-3'-phosphate
  modified_base 7: mod_base = OTHER; note = 2'-O-methyluridine-3'-phosphate
  modified_base 8: mod_base = OTHER; note = 2'-O-methyluridine-3'-phosphate
  modified_base 9: mod_base = OTHER; note = 2'-O-methyladenosine-3'-phosphate
  modified_base 11: mod_base = OTHER; note = 2'-O-methyladenosine-3'-phosphate
  modified_base 12: mod_base = OTHER; note = 2'-O-methyluridine-3'-phosphate
  modified_base 13: mod_base = OTHER; note = 2'-O-methylguanosine-3'-phosphate
  modified_base 15: mod_base = OTHER; note = 2'-O-methyladenosine-3'-phosphate
  modified_base 16: mod_base = OTHER; note = 2'-O-methyladenosine-3'-phosphate
  modified_base 17: mod_base = OTHER; note = 2'-O-methyluridine-3'-phosphate
  modified_base 18: mod_base = OTHER; note = 2'-O-methylcytidine-3'-phosphate
  modified_base 19: mod_base = OTHER; note = 2'-O-methylcytidine-3'-phosphate
  modified_base 20: mod_base = OTHER; note = 2'-O-methylcytidine-3'-phosphate
  modified_base 21: mod_base = OTHER; note = 2'-O-methyladenosine-3'-phosphorothioate
  modified_base 22: mod_base = OTHER; note = 2'-O-methyluridine-3'-phosphorothioate
  modified_base 23: mod_base = OTHER; note = 2'-O-methylcytidine
  misc_feature 1: note = RNA
  misc_feature 3..9: note = RNA
  misc_feature 11..13: note = RNA
  misc_feature 15..23: note = RNA
  misc_feature 2: note = DNA
  misc_feature 10: note = DNA
  misc_feature 14: note = DNA
tcttggttacatgaaatcccatc

SEQ ID NO: 119 - DNA, 23 bp, synthetic construct
  source 1..23: mol_type = other DNA
  modified_base 1: mod_base = OTHER; note = 2'-O-methyluridine-3'-phosphorothioate
  modified_base 2: mod_base = OTHER; note = 2'-deoxycytidine-3'-phosphorothioate
  modified_base 3: mod_base = OTHER; note = 2'-O-methyluridine-3'-phosphate
  modified_base 4: mod_base = OTHER; note = 2'-O-methyluridine-3'-phosphate
  modified_base 5: mod_base = OTHER; note = 2'-O-methylguanosine-3'-phosphate
  modified_base 6: mod_base = OTHER; note = 2'-O-methylguanosine-3'-phosphate
  modified_base 7: mod_base = OTHER; note = 2'-O-methyluridine-3'-phosphate
  modified_base 8: mod_base = OTHER; note = 2'-O-methyluridine-3'-phosphate
  modified_base 9: mod_base = OTHER; note = 2'-O-methyladenosine-3'-phosphate
  modified_base 10: mod_base = OTHER; note = 2'-deoxycytidine-3'-phosphorothioate
  modified_base 11: mod_base = OTHER; note = 2'-O-methyladenosine-3'-phosphate
  modified_base 12: mod_base = OTHER; note = 2'-O-methyluridine-3'-phosphate
  modified_base 13: mod_base = OTHER; note = 2'-O-methylguanosine-3'-phosphate
  modified_base 14: mod_base = OTHER; note = 2'-deoxyadenosine-3'-phosphorothioate
  modified_base 15: mod_base = OTHER; note = 2'-O-methyladenosine-3'-phosphate
  modified_base 16: mod_base = OTHER; note = 2'-O-methyladenosine-3'-phosphate
  modified_base 17: mod_base = OTHER; note = 2'-O-methyluridine-3'-phosphate
  modified_base 18: mod_base = OTHER; note = 2'-O-methylcytidine-3'-phosphate
  modified_base 19: mod_base = OTHER; note = 2'-O-methylcytidine-3'-phosphate
  modified_base 20: mod_base = OTHER; note = 2'-O-methylcytidine-3'-phosphate
  modified_base 21: mod_base = OTHER; note = 2'-O-methyladenosine-3'-phosphorothioate
  modified_base 22: mod_base = OTHER; note = 2'-O-methyluridine-3'-phosphorothioate
  modified_base 23: mod_base = OTHER; note = 2'-O-methylcytidine
  misc_feature 1: note = RNA
  misc_feature 3..9: note = RNA
  misc_feature 11..13: note = RNA
  misc_feature 15..23: note = RNA
  misc_feature 2: note = DNA
  misc_feature 10: note = DNA
  misc_feature 14: note = DNA
tcttggttacatgaaatcccatc

SEQ ID NO: 120 - DNA, 23 bp, synthetic construct
  source 1..23: mol_type = other DNA
  modified_base 1: mod_base = OTHER; note = 2'-O-methyluridine-3'-phosphorothioate
  modified_base 2: mod_base = OTHER; note = 2'-deoxycytidine-3'-phosphorothioate
  modified_base 3: mod_base = OTHER; note = 2'-O-methyluridine-3'-phosphate
  modified_base 4: mod_base = OTHER; note = 2'-O-methyluridine-3'-phosphate
  modified_base 5: mod_base = OTHER; note = 2'-O-methylguanosine-3'-phosphate
  modified_base 6: mod_base = OTHER; note = 2'-O-methylguanosine-3'-phosphate
  modified_base 7: mod_base = OTHER; note = 2'-O-methyluridine-3'-phosphate
  modified_base 8: mod_base = OTHER; note = 2'-O-methyluridine-3'-phosphate
  modified_base 9: mod_base = OTHER; note = 2'-O-methyladenosine-3'-phosphate
  modified_base 10: mod_base = OTHER; note = 2'-deoxycytidine-3'-phosphorothioate
  modified_base 11: mod_base = OTHER; note = 2'-O-methyladenosine-3'-phosphate
  modified_base 12: mod_base = OTHER; note = 2'-O-methyluridine-3'-phosphate
  modified_base 13: mod_base = OTHER; note = 2'-O-methylguanosine-3'-phosphate
  modified_base 14: mod_base = OTHER; note = 2'-deoxyadenosine-3'-phosphorothioate
  modified_base 15: mod_base = OTHER; note = 2'-O-methyladenosine-3'-phosphate
  modified_base 16: mod_base = OTHER; note = 2'-O-methyladenosine-3'-phosphate
  modified_base 17: mod_base = OTHER; note = 2'-O-methyluridine-3'-phosphate
  modified_base 18: mod_base = OTHER; note = 2'-O-methylcytidine-3'-phosphate
  modified_base 19: mod_base = OTHER; note = 2'-O-methylcytidine-3'-phosphate
  modified_base 20: mod_base = OTHER; note = 2'-O-methylcytidine-3'-phosphate
  modified_base 21: mod_base = OTHER; note = 2'-O-methyladenosine-3'-phosphorothioate
  modified_base 22: mod_base = OTHER; note = 2'-O-methyluridine-3'-phosphorothioate
  modified_base 23: mod_base = OTHER; note = 2'-O-methylcytidine
  misc_feature 1: note = RNA
  misc_feature 3..9: note = RNA
  misc_feature 11..13: note = RNA
  misc_feature 15..23: note = RNA
  misc_feature 2: note = DNA
  misc_feature 10: note = DNA
  misc_feature 14: note = DNA
tcttggttacatgaaatcccatc

SEQ ID NO: 121 - DNA, 23 bp, synthetic construct
  source 1..23: mol_type = other DNA
  modified_base 1: mod_base = OTHER; note = 2'-O-methyluridine-3'-phosphorothioate
  modified_base 2: mod_base = OTHER; note = 2'-deoxycytidine-3'-phosphorothioate
  modified_base 3: mod_base = OTHER; note = 2'-O-methyluridine-3'-phosphate
  modified_base 4: mod_base = OTHER; note = 2'-O-methyluridine-3'-phosphate
  modified_base 5: mod_base = OTHER; note = 2'-O-methylguanosine-3'-phosphate
  modified_base 6: mod_base = OTHER; note = 2'-O-methylguanosine-3'-phosphate
  modified_base 7: mod_base = OTHER; note = 2'-O-methyluridine-3'-phosphate
  modified_base 8: mod_base = OTHER; note = 2'-O-methyluridine-3'-phosphate
  modified_base 9: mod_base = OTHER; note = 2'-O-methyladenosine-3'-phosphate
  modified_base 11: mod_base = OTHER; note = 2'-O-methyladenosine-3'-phosphate
  modified_base 12: mod_base = OTHER; note = 2'-O-methyluridine-3'-phosphate
  modified_base 13: mod_base = OTHER; note = 2'-O-methylguanosine-3'-phosphate
  modified_base 15: mod_base = OTHER; note = 2'-O-methyladenosine-3'-phosphate
  modified_base 16: mod_base = OTHER; note = 2'-O-methyladenosine-3'-phosphate
  modified_base 17: mod_base = OTHER; note = 2'-O-methyluridine-3'-phosphate
  modified_base 18: mod_base = OTHER; note = 2'-O-methylcytidine-3'-phosphate
  modified_base 19: mod_base = OTHER; note = 2'-O-methylcytidine-3'-phosphate
  modified_base 20: mod_base = OTHER; note = 2'-O-methylcytidine-3'-phosphate
  modified_base 21: mod_base = OTHER; note = 2'-O-methyladenosine-3'-phosphorothioate
  modified_base 22: mod_base = OTHER; note = 2'-O-methyluridine-3'-phosphorothioate
  modified_base 23: mod_base = OTHER; note = 2'-O-methylcytidine
  misc_feature 1: note = RNA
  misc_feature 3..9: note = RNA
  misc_feature 11..13: note = RNA
  misc_feature 15..23: note = RNA
  misc_feature 2: note = DNA
  misc_feature 10: note = DNA
  misc_feature 14: note = DNA
tcttggttacatgaaatcccatc

SEQ ID NO: 122 - DNA, 21 bp, synthetic construct
  source 1..21: mol_type = other DNA
  modified_base 1: mod_base = OTHER; note = 2'-O-methyluridine-3'-phosphorothioate
  modified_base 2: mod_base = OTHER; note = 2'-deoxycytidine-3'-phosphorothioate
  modified_base 3: mod_base = OTHER; note = 2'-O-methyluridine-3'-phosphate
  modified_base 4: mod_base = OTHER; note = 2'-O-methyluridine-3'-phosphate
  modified_base 5: mod_base = OTHER; note = 2'-O-methylguanosine-3'-phosphate
  modified_base 6: mod_base = OTHER; note = 2'-O-methylguanosine-3'-phosphate
  modified_base 7: mod_base = OTHER; note = 2'-O-methyluridine-3'-phosphate
  modified_base 8: mod_base = OTHER; note = 2'-O-methyluridine-3'-phosphate
  modified_base 9: mod_base = OTHER; note = 2'-O-methyladenosine-3'-phosphate
  modified_base 11: mod_base = OTHER; note = 2'-O-methyladenosine-3'-phosphate
  modified_base 12: mod_base = OTHER; note = 2'-O-methyluridine-3'-phosphate
  modified_base 13: mod_base = OTHER; note = 2'-O-methylguanosine-3'-phosphate
  modified_base 15: mod_base = OTHER; note = 2'-O-methyladenosine-3'-phosphate
  modified_base 16: mod_base = OTHER; note = 2'-O-methyladenosine-3'-phosphate
  modified_base 17: mod_base = OTHER; note = 2'-O-methyluridine-3'-phosphate
  modified_base 18: mod_base = OTHER; note = 2'-O-methylcytidine-3'-phosphate
  modified_base 19: mod_base = OTHER; note = 2'-O-methylcytidine-3'-phosphorothioate
  modified_base 20: mod_base = OTHER; note = 2'-O-methylcytidine-3'-phosphorothioate
  modified_base 21: mod_base = OTHER; note = 2'-O-methyladenosine
  misc_feature 1: note = RNA
  misc_feature 3..9: note = RNA
  misc_feature 11..13: note = RNA
  misc_feature 15..21: note = RNA
  misc_feature 2: note = DNA
  misc_feature 10: note = DNA
  misc_feature 14: note = DNA
tcttggttacatgaaatccca

SEQ ID NO: 123 - RNA, 23 nt, synthetic construct
  source 1..23: mol_type = other RNA
  modified_base 1: mod_base = OTHER; note = 2'-O-methyluridine-3'-phosphorothioate
  modified_base 2: mod_base = OTHER; note = 2'-deoxy-2'-fluorocytidine-3'-phosphorothioate
  modified_base 3: mod_base = OTHER; note = 2'-O-methyluridine-3'-phosphate
  modified_base 4: mod_base = OTHER; note = 2'-O-methyluridine-3'-phosphate
  modified_base 5: mod_base = OTHER; note = 2'-O-methylguanosine-3'-phosphate
  modified_base 6: mod_base = OTHER; note = 2'-O-methylguanosine-3'-phosphate
  modified_base 7: mod_base = OTHER; note = 2'-O-methyluridine-3'-phosphate
  modified_base 8: mod_base = OTHER; note = 2'-O-methyluridine-3'-phosphate
  modified_base 9: mod_base = OTHER; note = 2'-O-methyladenosine-3'-phosphate
  modified_base 10: mod_base = OTHER; note = 2'-O-methylcytidine-3'-phosphate
  modified_base 11: mod_base = OTHER; note = 2'-O-methyladenosine-3'-phosphate
  modified_base 12: mod_base = OTHER; note = 2'-O-methyluridine-3'-phosphate
  modified_base 13: mod_base = OTHER; note = 2'-O-methylguanosine-3'-phosphate
  modified_base 14: mod_base = OTHER; note = 2'-deoxy-2'-fluoroadenosine-3'-phosphate
  modified_base 15: mod_base = OTHER; note = 2'-O-methyladenosine-3'-phosphate
  modified_base 16: mod_base = OTHER; note = 2'-O-methyladenosine-3'-phosphate
  modified_base 17: mod_base = OTHER; note = 2'-O-methyluridine-3'-phosphate
  modified_base 18: mod_base = OTHER; note = 2'-O-methylcytidine-3'-phosphate
  modified_base 19: mod_base = OTHER; note = 2'-O-methylcytidine-3'-phosphate
  modified_base 20: mod_base = OTHER; note = 2'-O-methylcytidine-3'-phosphate
  modified_base 21: mod_base = OTHER; note = 2'-O-methyladenosine-3'-phosphorothioate
  modified_base 22: mod_base = OTHER; note = 2'-O-methyluridine-3'-phosphorothioate
  modified_base 23: mod_base = OTHER; note = 2'-O-methylcytidine
tcttggttacatgaaatcccatc

SEQ ID NO: 124 - DNA, 21 bp, synthetic construct
  source 1..21: mol_type = other DNA
  modified_base 1: mod_base = OTHER; note = 2'-O-methyluridine-3'-phosphorothioate
  modified_base 2: mod_base = OTHER; note = 2'-deoxycytidine-3'-phosphorothioate
  modified_base 3: mod_base = OTHER; note = 2'-O-methyluridine-3'-phosphate
  modified_base 4: mod_base = OTHER; note = 2'-O-methyluridine-3'-phosphate
  modified_base 5: mod_base = OTHER; note = 2'-O-methylguanosine-3'-phosphate
  modified_base 6: mod_base = OTHER; note = 2'-O-methylguanosine-3'-phosphate
  modified_base 7: mod_base = OTHER; note = 2'-O-methyluridine-3'-phosphate
  modified_base 8: mod_base = OTHER; note = 2'-O-methyluridine-3'-phosphate
  modified_base 9: mod_base = OTHER; note = 2'-O-methyladenosine-3'-phosphate
  modified_base 11: mod_base = OTHER; note = 2'-O-methyladenosine-3'-phosphate
  modified_base 12: mod_base = OTHER; note = 2'-O-methyluridine-3'-phosphate
  modified_base 13: mod_base = OTHER; note = 2'-O-methylguanosine-3'-phosphate
  modified_base 15: mod_base = OTHER; note = 2'-O-methyladenosine-3'-phosphate
  modified_base 16: mod_base = OTHER; note = 2'-O-methyladenosine-3'-phosphate
  modified_base 17: mod_base = OTHER; note = 2'-O-methyluridine-3'-phosphate
  modified_base 18: mod_base = OTHER; note = 2'-O-methylcytidine-3'-phosphate
  modified_base 19: mod_base = OTHER; note = 2'-O-methylcytidine-3'-phosphorothioate
  modified_base 20: mod_base = OTHER; note = 2'-O-methylcytidine-3'-phosphorothioate
  modified_base 21: mod_base = OTHER; note = 2'-O-methyladenosine
  misc_feature 1: note = RNA
  misc_feature 3..9: note = RNA
  misc_feature 11..13: note = RNA
  misc_feature 15..21: note = RNA
  misc_feature 2: note = DNA
  misc_feature 10: note = DNA
  misc_feature 14: note = DNA
tcttggttacatgaaatccca

SEQ ID NO: 125 - DNA, 23 bp, synthetic construct
  source 1..23: mol_type = other DNA
  modified_base 1: mod_base = OTHER; note = 2'-O-methyluridine-3'-phosphorothioate
  modified_base 2: mod_base = OTHER; note = 2'-deoxycytidine-3'-phosphorothioate
  modified_base 3: mod_base = OTHER; note = 2'-O-methyluridine-3'-phosphate
  modified_base 4: mod_base = OTHER; note = 2'-O-methyluridine-3'-phosphate
  modified_base 5: mod_base = OTHER; note = 2'-O-methylguanosine-3'-phosphate
  modified_base 6: mod_base = OTHER; note = 2'-O-methylguanosine-3'-phosphate
  modified_base 7: mod_base = OTHER; note = 2'-O-methyluridine-3'-phosphate
  modified_base 8: mod_base = OTHER; note = 2'-O-methyluridine-3'-phosphate
  modified_base 9: mod_base = OTHER; note = 2'-O-methyladenosine-3'-phosphate
  modified_base 11: mod_base = OTHER; note = 2'-O-methyladenosine-3'-phosphate
  modified_base 12: mod_base = OTHER; note = 2'-O-methyluridine-3'-phosphate
  modified_base 13: mod_base = OTHER; note = 2'-O-methylguanosine-3'-phosphate
  modified_base 15: mod_base = OTHER; note = 2'-O-methyladenosine-3'-phosphate
  modified_base 16: mod_base = OTHER; note = 2'-O-methyladenosine-3'-phosphate
  modified_base 17: mod_base = OTHER; note = 2'-O-methyluridine-3'-phosphate
  modified_base 18: mod_base = OTHER; note = 2'-O-methylcytidine-3'-phosphate
  modified_base 19: mod_base = OTHER; note = 2'-O-methylcytidine-3'-phosphate
  modified_base 20: mod_base = OTHER; note = 2'-O-methylcytidine-3'-phosphate
  modified_base 21: mod_base = OTHER; note = 2'-O-methyladenosine-3'-phosphorothioate
  modified_base 22: mod_base = OTHER; note = 2'-O-methyluridine-3'-phosphorothioate
  modified_base 23: mod_base = OTHER; note = 2'-O-methylcytidine
  misc_feature 1: note = RNA
  misc_feature 3..9: note = RNA
  misc_feature 11..13: note = RNA
  misc_feature 15..23: note = RNA
  misc_feature 2: note = DNA
  misc_feature 10: note = DNA
  misc_feature 14: note = DNA
tcttggttacatgaaatcccatc

SEQ ID NO: 126 - DNA, 23 bp, synthetic construct
  source 1..23: mol_type = other DNA
  modified_base 1: mod_base = OTHER; note = 2'-O-methyluridine-3'-phosphorothioate
  modified_base 2: mod_base = OTHER; note = 2'-deoxycytidine-3'-phosphorothioate
  modified_base 3: mod_base = OTHER; note = 2'-O-methyluridine-3'-phosphate
  modified_base 4: mod_base = OTHER; note = 2'-O-methyluridine-3'-phosphate
  modified_base 5: mod_base = OTHER; note = 2'-O-methylguanosine-3'-phosphate
  modified_base 6: mod_base = OTHER; note = 2'-O-methylguanosine-3'-phosphate
  modified_base 7: mod_base = OTHER; note = 2'-O-methyluridine-3'-phosphate
  modified_base 8: mod_base = OTHER; note = 2'-O-methyluridine-3'-phosphate
  modified_base 9: mod_base = OTHER; note = 2'-O-methyladenosine-3'-phosphate
  modified_base 10: mod_base = OTHER; note = 2'-deoxycytidine-3'-phosphorothioate
  modified_base 11: mod_base = OTHER; note = 2'-O-methyladenosine-3'-phosphate
  modified_base 12: mod_base = OTHER; note = 2'-O-methyluridine-3'-phosphate
  modified_base 13: mod_base = OTHER; note = 2'-O-methylguanosine-3'-phosphate
  modified_base 14: mod_base = OTHER; note = 2'-deoxyadenosine-3'-phosphorothioate
  modified_base 15: mod_base = OTHER; note = 2'-O-methyladenosine-3'-phosphate
  modified_base 16: mod_base = OTHER; note = 2'-O-methyladenosine-3'-phosphate
  modified_base 17: mod_base = OTHER; note = 2'-O-methyluridine-3'-phosphate
  modified_base 18: mod_base = OTHER; note = 2'-O-methylcytidine-3'-phosphate
  modified_base 19: mod_base = OTHER; note = 2'-O-methylcytidine-3'-phosphate
  modified_base 20: mod_base = OTHER; note = 2'-O-methylcytidine-3'-phosphate
  modified_base 21: mod_base = OTHER; note = 2'-O-methyladenosine-3'-phosphorothioate
  modified_base 22: mod_base = OTHER; note = 2'-O-methyluridine-3'-phosphorothioate
  modified_base 23: mod_base = OTHER; note = 2'-O-methylcytidine
  misc_feature 1: note = RNA
  misc_feature 3..9: note = RNA
  misc_feature 11..13: note = RNA
  misc_feature 15..23: note = RNA
  misc_feature 2: note = DNA
  misc_feature 10: note = DNA
  misc_feature 14: note = DNA
tcttggttacatgaaatcccatc

SEQ ID NO: 127 - RNA, 23 nt, synthetic construct
  source 1..23: mol_type = other RNA
  modified_base 1: mod_base = OTHER; note = 2'-O-methyluridine-3'-phosphorothioate
  modified_base 2: mod_base = OTHER; note = 2'-deoxy-2'-fluorocytidine-3'-phosphorothioate
  modified_base 3: mod_base = OTHER; note = 2'-O-methyluridine-3'-phosphate
  modified_base 4: mod_base = OTHER; note = 2'-O-methyluridine-3'-phosphate
  modified_base 5: mod_base = OTHER; note = 2'-O-methylguanosine-3'-phosphate
  modified_base 6: mod_base = OTHER; note = 2'-O-methylguanosine-3'-phosphate
  modified_base 7: mod_base = OTHER; note = 2'-O-methyluridine-3'-phosphate
  modified_base 8: mod_base = OTHER; note = 2'-O-methyluridine-3'-phosphate
  modified_base 9: mod_base = OTHER; note = 2'-O-methyladenosine-3'-phosphate
  modified_base 10: mod_base = OTHER; note = 2'-O-methylcytidine-3'-phosphate
  modified_base 11: mod_base = OTHER; note = 2'-O-methyladenosine-3'-phosphate
  modified_base 12: mod_base = OTHER; note = 2'-O-methyluridine-3'-phosphate
  modified_base 13: mod_base = OTHER; note = 2'-O-methylguanosine-3'-phosphate
  modified_base 14: mod_base = OTHER; note = 2'-deoxy-2'-fluoroadenosine-3'-phosphate
  modified_base 15: mod_base = OTHER; note = 2'-O-methyladenosine-3'-phosphate
  modified_base 16: mod_base = OTHER; note = 2'-O-methyladenosine-3'-phosphate
  modified_base 17: mod_base = OTHER; note = 2'-O-methyluridine-3'-phosphate
  modified_base 18: mod_base = OTHER; note = 2'-O-methylcytidine-3'-phosphate
  modified_base 19: mod_base = OTHER; note = 2'-O-methylcytidine-3'-phosphate
  modified_base 20: mod_base = OTHER; note = 2'-O-methylcytidine-3'-phosphate
  modified_base 21: mod_base = OTHER; note = 2'-O-methyladenosine-3'-phosphorothioate
  modified_base 22: mod_base = OTHER; note = 2'-O-methyluridine-3'-phosphorothioate
  modified_base 23: mod_base = OTHER; note = 2'-O-methylcytidine
tcttggttacatgaaatcccatc

SEQ ID NO: 128 - DNA, 23 bp, synthetic construct
  source 1..23: mol_type = other DNA
  modified_base 1: mod_base = OTHER; note = 2'-O-methyluridine-3'-phosphorothioate 5'phosphate
  modified_base 2: mod_base = OTHER; note = 2'-deoxycytidine-3'-phosphorothioate
  modified_base 3: mod_base = OTHER; note = 2'-O-methyluridine-3'-phosphate
  modified_base 4: mod_base = OTHER; note = 2'-O-methyluridine-3'-phosphate
  modified_base 5: mod_base = OTHER; note = 2'-O-methylguanosine-3'-phosphate
  modified_base 6: mod_base = OTHER; note = 2'-O-methylguanosine-3'-phosphate
  modified_base 7: mod_base = OTHER; note = 2'-O-methyluridine-3'-phosphate
  modified_base 8: mod_base = OTHER; note = 2'-O-methyluridine-3'-phosphate
  modified_base 9: mod_base = OTHER; note = 2'-O-methyladenosine-3'-phosphate
  modified_base 11: mod_base = OTHER; note = 2'-O-methyladenosine-3'-phosphate
  modified_base 12: mod_base = OTHER; note = 2'-O-methyluridine-3'-phosphate
  modified_base 13: mod_base = OTHER; note = 2'-O-methylguanosine-3'-phosphate
  modified_base 15: mod_base = OTHER; note = 2'-O-methyladenosine-3'-phosphate
  modified_base 16: mod_base = OTHER; note = 2'-O-methyladenosine-3'-phosphate
  modified_base 17: mod_base = OTHER; note = 2'-O-methyluridine-3'-phosphate
  modified_base 18: mod_base = OTHER; note = 2'-O-methylcytidine-3'-phosphate
  modified_base 19: mod_base = OTHER; note = 2'-O-methylcytidine-3'-phosphate
  modified_base 20: mod_base = OTHER; note = 2'-O-methylcytidine-3'-phosphate
  modified_base 21: mod_base = OTHER; note = 2'-O-methyladenosine-3'-phosphorothioate
  modified_base 22: mod_base = OTHER; note = 2'-O-methyluridine-3'-phosphorothioate
  modified_base 23: mod_base = OTHER; note = 2'-O-methylcytidine
  misc_feature 1: note = RNA
  misc_feature 3..9: note = RNA
  misc_feature 11..13: note = RNA
  misc_feature 15..23: note = RNA
  misc_feature 2: note = DNA
  misc_feature 10: note = DNA
  misc_feature 14: note = DNA
tcttggttacatgaaatcccatc

SEQ ID NO: 129 - RNA, 23 nt, synthetic construct
  source 1..23: mol_type = other RNA
  modified_base 1: mod_base = OTHER; note = 2'-O-methyluridine-3'-phosphate 5'phosphate
  modified_base 2: mod_base = OTHER; note = 2'-deoxy-2'-fluorocytidine-3'-phosphate
  modified_base 3: mod_base = OTHER; note = 2'-O-methyluridine-3'-phosphate
  modified_base 4: mod_base = OTHER; note = 2'-deoxy-2'-fluorouridine-3'-phosphate
  modified_base 5: mod_base = OTHER; note = 2'-O-methylguanosine-3'-phosphate
  modified_base 6: mod_base = OTHER; note = 2'-deoxy-2'-fluoroguanosine-3'-phosphate
  modified_base 7: mod_base = OTHER; note = 2'-deoxy-2'-fluorouridine-3'-phosphate
  modified_base 8: mod_base = OTHER; note = 2'-deoxy-2'-fluorouridine-3'-phosphate
  modified_base 9: mod_base = OTHER; note = 2'-O-methyladenosine-3'-phosphate
  modified_base 10: mod_base = OTHER; note = 2'-deoxy-2'-fluorocytidine-3'-phosphate
  modified_base 11: mod_base = OTHER; note = 2'-O-methyladenosine-3'-phosphate
  modified_base 12: mod_base = OTHER; note = 2'-O-methyluridine-3'-phosphate
  modified_base 13: mod_base = OTHER; note = 2'-O-methylguanosine-3'-phosphate
  modified_base 14: mod_base = OTHER; note = 2'-deoxy-2'-fluoroadenosine-3'-phosphate
  modified_base 15: mod_base = OTHER; note = 2'-O-methyladenosine-3'-phosphate
  modified_base 16: mod_base = OTHER; note = 2'-deoxy-2'-fluoroadenosine-3'-phosphate
  modified_base 17: mod_base = OTHER; note = 2'-O-methyluridine-3'-phosphate
  modified_base 18: mod_base = OTHER; note = 2'-deoxy-2'-fluorocytidine-3'-phosphate
  modified_base 19: mod_base = OTHER; note = 2'-O-methylcytidine-3'-phosphate
  modified_base 20: mod_base = OTHER; note = 2'-deoxy-2'-fluorocytidine-3'-phosphate
  modified_base 21: mod_base = OTHER; note = 2'-O-methyladenosine-3'-phosphorothioate
  modified_base 22: mod_base = OTHER; note = 2'-deoxy-2'-fluorouridine-3'-phosphorothioate
  modified_base 23: mod_base = OTHER; note = 2'-O-methylcytidine
tcttggttacatgaaatcccatc

SEQ ID NO: 130 - RNA, 23 nt, synthetic construct
  source 1..23: mol_type = other RNA
  modified_base 1: mod_base = OTHER; note = 2'-deoxy-2'-fluorouridine-3'-phosphate
  modified_base 2: mod_base = OTHER; note = 2'-deoxy-2'-fluorocytidine-3'-phosphate
  modified_base 3: mod_base = OTHER; note = 2'-O-methyluridine-3'-phosphate
  modified_base 4: mod_base = OTHER; note = 2'-deoxy-2'-fluorouridine-3'-phosphate
  modified_base 5: mod_base = OTHER; note = 2'-O-methylguanosine-3'-phosphate
  modified_base 6: mod_base = OTHER; note = 2'-deoxy-2'-fluoroguanosine-3'-phosphate
  modified_base 7: mod_base = OTHER; note = 2'-deoxy-2'-fluorouridine-3'-phosphate
  modified_base 8: mod_base = OTHER; note = 2'-deoxy-2'-fluorouridine-3'-phosphate
  modified_base 9: mod_base = OTHER; note = 2'-O-methyladenosine-3'-phosphate
  modified_base 10: mod_base = OTHER; note = 2'-deoxy-2'-fluorocytidine-3'-phosphate
  modified_base 11: mod_base = OTHER; note = 2'-O-methyladenosine-3'-phosphate
  modified_base 12: mod_base = OTHER; note = 2'-O-methyluridine-3'-phosphate
  modified_base 13: mod_base = OTHER; note = 2'-O-methylguanosine-3'-phosphate
  modified_base 14: mod_base = OTHER; note = 2'-deoxy-2'-fluoroadenosine-3'-phosphate
  modified_base 15: mod_base = OTHER; note = 2'-O-methyladenosine-3'-phosphate
  modified_base 16: mod_base = OTHER; note = 2'-deoxy-2'-fluoroadenosine-3'-phosphate
  modified_base 17: mod_base = OTHER; note = 2'-O-methyluridine-3'-phosphate
  modified_base 18: mod_base = OTHER; note = 2'-deoxy-2'-fluorocytidine-3'-phosphate
  modified_base 19: mod_base = OTHER; note = 2'-O-methylcytidine-3'-phosphate
  modified_base 20: mod_base = OTHER; note = 2'-deoxy-2'-fluorocytidine-3'-phosphate
  modified_base 21: mod_base = OTHER; note = 2'-O-methyladenosine-3'-phosphorothioate
  modified_base 22: mod_base = OTHER; note = 2'-deoxy-2'-fluorouridine-3'-phosphorothioate
  modified_base 23: mod_base = OTHER; note = 2'-O-methylcytidine
tcttggttacatgaaatcccatc

SEQ ID NO: 131 - RNA, 23 nt, synthetic construct
  source 1..23: mol_type = other RNA
  modified_base 1: mod_base = OTHER; note = 2'-O-methyluridine-3'-phosphorothioate 5'phosphate
  modified_base 2: mod_base = OTHER; note = 2'-deoxy-2'-fluorocytidine-3'-phosphorothioate
  modified_base 3: mod_base = OTHER; note = 2'-O-methyluridine-3'-phosphate
  modified_base 4: mod_base = OTHER; note = 2'-deoxy-2'-fluorouridine-3'-phosphate
  modified_base 5: mod_base = OTHER; note = 2'-O-methylguanosine-3'-phosphate
  modified_base 6: mod_base = OTHER; note = 2'-deoxy-2'-fluoroguanosine-3'-phosphate
  modified_base 7: mod_base = OTHER; note = 2'-O-methyluridine-3'-phosphate
  modified_base 8: mod_base = OTHER; note = 2'-deoxy-2'-fluorouridine-3'-phosphate
  modified_base 9: mod_base = OTHER; note = 2'-O-methyladenosine-3'-phosphate
  modified_base 10: mod_base = OTHER; note = 2'-deoxy-2'-fluorocytidine-3'-phosphate
  modified_base 11: mod_base = OTHER; note = 2'-O-methyladenosine-3'-phosphate
  modified_base 12: mod_base = OTHER; note = 2'-O-methyluridine-3'-phosphate
  modified_base 13: mod_base = OTHER; note = 2'-O-methylguanosine-3'-phosphate
  modified_base 14: mod_base = OTHER; note = 2'-deoxy-2'-fluoroadenosine-3'-phosphate
  modified_base 15: mod_base = OTHER; note = 2'-O-methyladenosine-3'-phosphate
  modified_base 16: mod_base = OTHER; note = 2'-deoxy-2'-fluoroadenosine-3'-phosphate
  modified_base 17: mod_base = OTHER; note = 2'-O-methyluridine-3'-phosphate
  modified_base 18: mod_base = OTHER; note = 2'-deoxy-2'-fluorocytidine-3'-phosphate
  modified_base 19: mod_base = OTHER; note = 2'-O-methylcytidine-3'-phosphate
  modified_base 20: mod_base = OTHER; note = 2'-deoxy-2'-fluorocytidine-3'-phosphate
  modified_base 21: mod_base = OTHER; note = 2'-O-methyladenosine-3'-phosphorothioate
  modified_base 22: mod_base = OTHER; note = 2'-O-methyluridine-3'-phosphorothioate
  modified_base 23: mod_base = OTHER; note = 2'-O-methylcytidine
tcttggttacatgaaatcccatc

SEQ ID NO: 132 - RNA, 23 nt, synthetic construct
  source 1..23: mol_type = other RNA
  modified_base 1: mod_base = OTHER; note = 2'-O-methyluridine-3'-phosphate
  modified_base 2: mod_base = OTHER; note = 2'-deoxy-2'-fluorocytidine-3'-phosphate
  modified_base 3: mod_base = OTHER; note = 2'-O-methyluridine-3'-phosphate
  modified_base 4: mod_base = OTHER; note = 2'-deoxy-2'-fluorouridine-3'-phosphate
  modified_base 5: mod_base = OTHER; note = 2'-O-methylguanosine-3'-phosphate
  modified_base 6: mod_base = OTHER; note = 2'-deoxy-2'-fluoroguanosine-3'-phosphate
  modified_base 7: mod_base = OTHER; note = 2'-deoxy-2'-fluorouridine-3'-phosphate
  modified_base 8: mod_base = OTHER; note = 2'-deoxy-2'-fluorouridine-3'-phosphate
  modified_base 9: mod_base = OTHER; note = 2'-O-methyladenosine-3'-phosphate
  modified_base 10: mod_base = OTHER; note = 2'-deoxy-2'-fluorocytidine-3'-phosphate
  modified_base 11: mod_base = OTHER; note = 2'-O-methyladenosine-3'-phosphate
  modified_base 12: mod_base = OTHER; note = 2'-O-methyluridine-3'-phosphate
  modified_base 13: mod_base = OTHER; note = 2'-O-methylguanosine-3'-phosphate
  modified_base 14: mod_base = OTHER; note = 2'-deoxy-2'-fluoroadenosine-3'-phosphate
  modified_base 15: mod_base = OTHER; note = 2'-O-methyladenosine-3'-phosphate
  modified_base 16: mod_base = OTHER; note = 2'-deoxy-2'-fluoroadenosine-3'-phosphate
  modified_base 17: mod_base = OTHER; note = 2'-O-methyluridine-3'-phosphate
  modified_base 18: mod_base = OTHER; note = 2'-deoxy-2'-fluorocytidine-3'-phosphate
  modified_base 19: mod_base = OTHER; note = 2'-O-methylcytidine-3'-phosphate
  modified_base 20: mod_base = OTHER; note = 2'-deoxy-2'-fluorocytidine-3'-phosphate
  modified_base 21: mod_base = OTHER; note = 2'-O-methyladenosine-3'-phosphorothioate
  modified_base 22: mod_base = OTHER; note = 2'-deoxy-2'-fluorouridine-3'-phosphorothioate
  modified_base 23: mod_base = OTHER; note = 2'-O-methylcytidine
tcttggttacatgaaatcccatc

SEQ ID NO: 133 - RNA, 23 nt, synthetic construct
  source 1..23: mol_type = other RNA
  modified_base 1: mod_base = OTHER; note = 2'-deoxy-2'-fluorouridine-3'-phosphorothioate
  modified_base 2: mod_base = OTHER; note = 2'-deoxy-2'-fluorocytidine-3'-phosphorothioate
  modified_base 3: mod_base = OTHER; note = 2'-O-methyluridine-3'-phosphate
  modified_base 4: mod_base = OTHER; note = 2'-deoxy-2'-fluorouridine-3'-phosphate
  modified_base 5: mod_base = OTHER; note = 2'-O-methylguanosine-3'-phosphate
  modified_base 6: mod_base = OTHER; note = 2'-deoxy-2'-fluoroguanosine-3'-phosphate
  modified_base 7: mod_base = OTHER; note = 2'-O-methyluridine-3'-phosphate
  modified_base 8: mod_base = OTHER; note = 2'-deoxy-2'-fluorouridine-3'-phosphate
  modified_base 9: mod_base = OTHER; note = 2'-O-methyladenosine-3'-phosphate
  modified_base 10: mod_base = OTHER; note = 2'-deoxy-2'-fluorocytidine-3'-phosphate
  modified_base 11: mod_base = OTHER; note = 2'-O-methyladenosine-3'-phosphate
  modified_base 12: mod_base = OTHER; note = 2'-O-methyluridine-3'-phosphate
  modified_base 13: mod_base = OTHER; note = 2'-O-methylguanosine-3'-phosphate
  modified_base 14: mod_base = OTHER; note = 2'-deoxy-2'-fluoroadenosine-3'-phosphate
  modified_base 15: mod_base = OTHER; note = 2'-O-methyladenosine-3'-phosphate
  modified_base 16: mod_base = OTHER; note = 2'-deoxy-2'-fluoroadenosine-3'-phosphate
  modified_base 17: mod_base = OTHER; note = 2'-O-methyluridine-3'-phosphate
  modified_base 18: mod_base = OTHER; note = 2'-deoxy-2'-fluorocytidine-3'-phosphate
  modified_base 19: mod_base = OTHER; note = 2'-O-methylcytidine-3'-phosphate
  modified_base 20: mod_base = OTHER; note = 2'-deoxy-2'-fluorocytidine-3'-phosphate
  modified_base 21: mod_base = OTHER; note = 2'-O-methyladenosine-3'-phosphorothioate
  modified_base 22: mod_base = OTHER; note = 2'-O-methyluridine-3'-phosphorothioate
  modified_base 23: mod_base = OTHER; note = 2'-O-methylcytidine
tcttggttacatgaaatcccatc

SEQ ID NO: 134 - RNA, 23 nt, synthetic construct
  source 1..23: mol_type = other RNA
  modified_base 1: mod_base = OTHER; note = 2'-O-methyluridine-3'-phosphorothioate
  modified_base 2: mod_base = OTHER; note = 2'-deoxy-2'-fluorocytidine-3'-phosphorothioate
  modified_base 3: mod_base = OTHER; note = 2'-O-methyluridine-3'-phosphate
  modified_base 4: mod_base = OTHER; note = 2'-deoxy-2'-fluorouridine-3'-phosphate
  modified_base 5: mod_base = OTHER; note = 2'-O-methylguanosine-3'-phosphate
  modified_base 6: mod_base = OTHER; note = 2'-deoxy-2'-fluoroguanosine-3'-phosphate
  modified_base 7: mod_base = OTHER; note = 2'-O-methyluridine-3'-phosphate
  modified_base 8: mod_base = OTHER; note = 2'-deoxy-2'-fluorouridine-3'-phosphate
  modified_base 9: mod_base = OTHER; note = 2'-O-methyladenosine-3'-phosphate
  modified_base 10: mod_base = OTHER; note = 2'-deoxy-2'-fluorocytidine-3'-phosphate
  modified_base 11: mod_base = OTHER; note = 2'-O-methyladenosine-3'-phosphate
  modified_base 12: mod_base = OTHER; note = 2'-O-methyluridine-3'-phosphate
  modified_base 13: mod_base = OTHER; note = 2'-O-methylguanosine-3'-phosphate
  modified_base 14: mod_base = OTHER; note = 2'-deoxy-2'-fluoroadenosine-3'-phosphate
  modified_base 15: mod_base = OTHER; note = 2'-O-methyladenosine-3'-phosphate
  modified_base 16: mod_base = OTHER; note = 2'-deoxy-2'-fluoroadenosine-3'-phosphate
  modified_base 17: mod_base = OTHER; note = 2'-O-methyluridine-3'-phosphate
  modified_base 18: mod_base = OTHER; note = 2'-deoxy-2'-fluorocytidine-3'-phosphate
  modified_base 19: mod_base = OTHER; note = 2'-O-methylcytidine-3'-phosphate
  modified_base 20: mod_base = OTHER; note = 2'-deoxy-2'-fluorocytidine-3'-phosphate
  modified_base 21: mod_base = OTHER; note = 2'-O-methyladenosine-3'-phosphorothioate
  modified_base 22: mod_base = OTHER; note = 2'-O-methyluridine-3'-phosphorothioate
  modified_base 23: mod_base = OTHER; note = 2'-O-methylcytidine
tcttggttacatgaaatcccatc

SEQ ID NO: 135 - RNA, 21 nt, synthetic construct
  source 1..21: mol_type = other RNA
atgggatttcatgtaaccaaa

SEQ ID NO: 136 - RNA, 21 nt, synthetic construct
  source 1..21: mol_type = other RNA
atgggatttcatgtaaccaaa

SEQ ID NO: 137 - RNA, 21 nt, synthetic construct
  source 1..21: mol_type = other RNA
atgggatttcatgtaaccaaa

SEQ ID NO: 138 - RNA, 21 nt, synthetic construct
  source 1..21: mol_type = other RNA
tgggatttcatgtaaccaaga

SEQ ID NO: 139 - RNA, 21 nt, synthetic construct
  source 1..21: mol_type = other RNA
tgggatttcatgtaaccaaga

SEQ ID NO: 140 - RNA, 21 nt, synthetic construct
  source 1..21: mol_type = other RNA
tgggatttcatgtaaccaaga

SEQ ID NO: 141 - RNA, 21 nt, synthetic construct
  source 1..21: mol_type = other RNA
tgggatttcatgtaaccaaga

SEQ ID NO: 142 - RNA, 21 nt, synthetic construct
  source 1..21: mol_type = other RNA
tttcatgtaaccaagagtatt

SEQ ID NO: 143 - RNA, 21 nt, synthetic construct
  source 1..21: mol_type = other RNA
tttcatgtaaccaagagtatt

SEQ ID NO: 144 - RNA, 21 nt, synthetic construct
  source 1..21: mol_type = other RNA
tttcatgtaaccaagagtatt

SEQ ID NO: 145 - RNA, 21 nt, synthetic construct
  source 1..21: mol_type = other RNA
tgtaaccaagagtattccatt

SEQ ID NO: 146 - RNA, 21 nt, synthetic construct
  source 1..21: mol_type = other RNA
tgtaaccaagagtattccatt

SEQ ID NO: 147 - RNA, 21 nt, synthetic construct
  source 1..21: mol_type = other RNA
tgtaaccaagagtattccatt

SEQ ID NO: 148 - RNA, 21 nt, synthetic construct
  source 1..21: mol_type = other RNA
aaccaagagtattccattttt

SEQ ID NO: 149 - RNA, 21 nt, synthetic construct
  source 1..21: mol_type = other RNA
aaccaagagtattccattttt

SEQ ID NO: 150 - RNA, 21 nt, synthetic construct
  source 1..21: mol_type = other RNA
aaccaagagtattccattttt

SEQ ID NO: 151 - RNA, 21 nt, synthetic construct
  source 1..21: mol_type = other RNA
tttttactaaagcagtgtttt

SEQ ID NO: 152 - RNA, 21 nt, synthetic construct
  source 1..21: mol_type = other RNA
tttttactaaagcagtgtttt

SEQ ID NO: 153 - RNA, 21 nt, synthetic construct
  source 1..21: mol_type = other RNA
tttttactaaagcagtgtttt

SEQ ID NO: 154 - RNA, 21 nt, synthetic construct
  source 1..21: mol_type = other RNA
ttactaaagcagtgttttcaa

SEQ ID NO: 155 - RNA, 21 nt, synthetic construct
  source 1..21: mol_type = other RNA
ctaaagcagtgttttcaccta

SEQ ID NO: 156 - RNA, 21 nt, synthetic construct
  source 1..21: mol_type = other RNA
ctaaagcagtgttttcaccta

SEQ ID NO: 157 - RNA, 21 nt, synthetic construct
  source 1..21: mol_type = other RNA
ctaaagcagtgttttcaccta

SEQ ID NO: 158 - RNA, 21 nt, synthetic construct
  source 1..21: mol_type = other RNA
ggcagagacaataaaacatta

SEQ ID NO: 159 - RNA, 21 nt, synthetic construct
  source 1..21: mol_type = other RNA
ggcagagacaataaaacatta

SEQ ID NO: 160 - RNA, 21 nt, synthetic construct
  source 1..21: mol_type = other RNA
ggcagagacaataaaacatta

SEQ ID NO: 161 - RNA, 21 nt, synthetic construct
  source 1..21: mol_type = other RNA
cagagacaataaaacattcct

SEQ ID NO: 162 - RNA, 21 nt, synthetic construct
  source 1..21: mol_type = other RNA
cagagacaataaaacattcct

SEQ ID NO: 163 - RNA, 21 nt, synthetic construct
  source 1..21: mol_type = other RNA
cagagacaataaaacattcct

SEQ ID NO: 164 - RNA, 21 nt, synthetic construct
  source 1..21: mol_type = other RNA
caataaaacattcctgtgaaa

SEQ ID NO: 165 - RNA, 21 nt, synthetic construct
  source 1..21: mol_type = other RNA
caataaaacattcctgtgaaa

SEQ ID NO: 166 - RNA, 21 nt, synthetic construct
  source 1..21: mol_type = other RNA
caataaaacattcctgtgaaa

SEQ ID NO: 167 - RNA, 23 nt, synthetic construct
  source 1..23: mol_type = other RNA
tttggttacatgaaatcccatcc

SEQ ID NO: 168 - RNA, 23 nt, synthetic construct
  source 1..23: mol_type = other RNA
tttggttacatgaaatcccatcc

SEQ ID NO: 169 - RNA, 23 nt, synthetic construct
  source 1..23: mol_type = other RNA
tttggttacatgaaatcccatcc

SEQ ID NO: 170 - RNA, 23 nt, synthetic construct
  source 1..23: mol_type = other RNA
tcttggttacatgaaatcccatc

SEQ ID NO: 171 - RNA, 23 nt, synthetic construct
  source 1..23: mol_type = other RNA
tcttggttacatgaaatcccatc

SEQ ID NO: 172 - RNA, 23 nt, synthetic construct
  source 1..23: mol_type = other RNA
tcttggttacatgaaatcccatc

SEQ ID NO: 173 - RNA, 23 nt, synthetic construct
  source 1..23: mol_type = other RNA
tcttggttacatgaaatcccatc

SEQ ID NO: 174 - RNA, 23 nt, synthetic construct
  source 1..23: mol_type = other RNA
aatactcttggttacatgaaatc

SEQ ID NO: 175 - RNA, 23 nt, synthetic construct
  source 1..23: mol_type = other RNA
aatactcttggttacatgaaatc

SEQ ID NO: 176 - RNA, 23 nt, synthetic construct
  source 1..23: mol_type = other RNA
aatactcttggttacatgaaatc

SEQ ID NO: 177 - RNA, 23 nt, synthetic construct
  source 1..23: mol_type = other RNA
aatggaatactcttggttacatg

SEQ ID NO: 178 - RNA, 23 nt, synthetic construct
  source 1..23: mol_type = other RNA
aatggaatactcttggttacatg

SEQ ID NO: 179 - RNA, 23 nt, synthetic construct
  source 1..23: mol_type = other RNA
aatggaatactcttggttacatg

SEQ ID NO: 180 - RNA, 23 nt, synthetic construct
  source 1..23: mol_type = other RNA
aaaaatggaatactcttggttac

SEQ ID NO: 181 - RNA, 23 nt, synthetic construct
  source 1..23: mol_type = other RNA
aaaaatggaatactcttggttac

SEQ ID NO: 182 - RNA, 23 nt, synthetic construct
  source 1..23: mol_type = other RNA
aaaaatggaatactcttggttac

SEQ ID NO: 183 - RNA, 23 nt, synthetic construct
  source 1..23: mol_type = other RNA
aaaacactgctttagtaaaaatg

SEQ ID NO: 184 - RNA, 23 nt, synthetic construct
  source 1..23: mol_type = other RNA
aaaacactgctttagtaaaaatg

SEQ ID NO: 185 - RNA, 23 nt, synthetic construct
  source 1..23: mol_type = other RNA
aaaacactgctttagtaaaaatg

SEQ ID NO: 186 - RNA, 23 nt, synthetic construct
  source 1..23: mol_type = other RNA
ttgaaaacactgctttagtaaaa

SEQ ID NO: 187 - RNA, 23 nt, synthetic construct
  source 1..23: mol_type = other RNA
taggtgaaaacactgctttagta

SEQ ID NO: 188 - RNA, 23 nt, synthetic construct
  source 1..23: mol_type = other RNA
taggtgaaaacactgctttagta

SEQ ID NO: 189 - RNA, 23 nt, synthetic construct
  source 1..23: mol_type = other RNA
taggtgaaaacactgctttagta

SEQ ID NO: 190 - RNA, 23 nt, synthetic construct
  source 1..23: mol_type = other RNA
taatgttttattgtctctgcctg

SEQ ID NO: 191 - RNA, 23 nt, synthetic construct
  source 1..23: mol_type = other RNA
taatgttttattgtctctgcctg

SEQ ID NO: 192 - RNA, 23 nt, synthetic construct
  source 1..23: mol_type = other RNA
taatgttttattgtctctgcctg

SEQ ID NO: 193 - RNA, 23 nt, synthetic construct
  source 1..23: mol_type = other RNA
aggaatgttttattgtctctgcc

SEQ ID NO: 194 - RNA, 23 nt, synthetic construct
  source 1..23: mol_type = other RNA
aggaatgttttattgtctctgcc

SEQ ID NO: 195 - RNA, 23 nt, synthetic construct
  source 1..23: mol_type = other RNA
aggaatgttttattgtctctgcc

SEQ ID NO: 196 - RNA, 23 nt, synthetic construct
  source 1..23: mol_type = other RNA
tttcacaggaatgttttattgtc

SEQ ID NO: 197 - RNA, 23 nt, synthetic construct
  source 1..23: mol_type = other RNA
tttcacaggaatgttttattgtc

SEQ ID NO: 198 - RNA, 23 nt, synthetic construct
  source 1..23: mol_type = other RNA
tttcacaggaatgttttattgtc

SEQ ID NO: 199 - RNA, 21 nt, synthetic construct
  source 1..21: mol_type = other RNA
  modified_base 1: mod_base = OTHER; note = 2'-O-methyladenosine-3'-phosphorothioate
  modified_base 2: mod_base = OTHER; note = 2'-O-methyluridine-3'-phosphorothioate
  modified_base 3: mod_base = OTHER; note = 2'-O-methylguanosine-3'-phosphate
  modified_base 4: mod_base = OTHER; note = 2'-O-methylguanosine-3'-phosphate
  modified_base 5: mod_base = OTHER; note = 2'-O-methylguanosine-3'-phosphate
  modified_base 6: mod_base = OTHER; note = 2'-O-methyladenosine-3'-phosphate
  modified_base 7: mod_base = OTHER; note = 2'-deoxy-2'-fluorouridine-3'-phosphate
  modified_base 8: mod_base = OTHER; note = 2'-O-methyluridine-3'-phosphate
  modified_base 9: mod_base = OTHER; note = 2'-deoxy-2'-fluorouridine-3'-phosphate
  modified_base 10: mod_base = OTHER; note = 2'-deoxy-2'-fluorocytidine-3'-phosphate
  modified_base 11: mod_base = OTHER; note = 2'-deoxy-2'-fluoroadenosine-3'-phosphate
  modified_base 12: mod_base = OTHER; note = 2'-O-methyluridine-3'-phosphate
  modified_base 13: mod_base = OTHER; note = 2'-O-methylguanosine-3'-phosphate
  modified_base 14: mod_base = OTHER; note = 2'-O-methyluridine-3'-phosphate
  modified_base 15: mod_base = OTHER; note = 2'-O-methyladenosine-3'-phosphate
  modified_base 16: mod_base = OTHER; note = 2'-O-methyladenosine-3'-phosphate
  modified_base 17: mod_base = OTHER; note = 2'-O-methylcytidine-3'-phosphate
  modified_base 18: mod_base = OTHER; note = 2'-O-methylcytidine-3'-phosphate
  modified_base 19: mod_base = OTHER; note = 2'-O-methyladenosine-3'-phosphate
  modified_base 20: mod_base = OTHER; note = 2'-O-methyladenosine-3'-phosphate
  modified_base 21: mod_base = OTHER; note = 2'-O-methyladenosine-3'-phosphate ((2S,4R)-1-[29-[[2-(acetylamino)-2-deoxy-beta-D-galactopyra nosyl]oxy]-14,14-bis[[3-[[3-[[5-[[2-(acetylamino)-2-deoxy-b eta-D-galactopyranosyl]oxy]-1-oxopentyl]amino]propyl]amino] -3-oxopropoxy]methyl]-1,12,19,25-tetraoxo-16-oxa-13,20,24-t riazanonacos-1-yl]-4-hydroxy-2-pyrrolidinyl)methyl ester
atgggatttcatgtaaccaaa

SEQ ID NO: 200 - RNA, 21 nt, synthetic construct
  source 1..21: mol_type = other RNA
  modified_base 1: mod_base = OTHER; note = 2'-deoxy-2'-fluoroadenosine-3'-phosphorothioate
  modified_base 2: mod_base = OTHER; note = 2'-O-methyluridine-3'-phosphorothioate
  modified_base 3: mod_base = OTHER; note = 2'-deoxy-2'-fluoroguanosine-3'-phosphate
  modified_base 4: mod_base = OTHER; note = 2'-O-methylguanosine-3'-phosphate
  modified_base 5: mod_base = OTHER; note = 2'-deoxy-2'-fluoroguanosine-3'-phosphate
  modified_base 6: mod_base = OTHER; note = 2'-O-methyladenosine-3'-phosphate
  modified_base 7: mod_base = OTHER; note = 2'-deoxy-2'-fluorouridine-3'-phosphate
  modified_base 8: mod_base = OTHER; note = 2'-O-methyluridine-3'-phosphate
  modified_base 9: mod_base = OTHER; note = 2'-deoxy-2'-fluorouridine-3'-phosphate
  modified_base 10: mod_base = OTHER; note = 2'-deoxy-2'-fluorocytidine-3'-phosphate
  modified_base 11: mod_base = OTHER; note = 2'-deoxy-2'-fluoroadenosine-3'-phosphate
  modified_base 12: mod_base = OTHER; note = 2'-O-methyluridine-3'-phosphate
  modified_base 13: mod_base = OTHER; note = 2'-deoxy-2'-fluoroguanosine-3'-phosphate
  modified_base 14: mod_base = OTHER; note = 2'-O-methyluridine-3'-phosphate
  modified_base 15: mod_base = OTHER; note = 2'-deoxy-2'-fluoroadenosine-3'-phosphate
  modified_base 16: mod_base = OTHER; note = 2'-O-methyladenosine-3'-phosphate
  modified_base 17: mod_base = OTHER; note = 2'-deoxy-2'-fluorocytidine-3'-phosphate
  modified_base 18: mod_base = OTHER; note = 2'-O-methylcytidine-3'-phosphate
  modified_base 19: mod_base = OTHER; note = 2'-deoxy-2'-fluoroadenosine-3'-phosphate
  modified_base 20: mod_base = OTHER; note = 2'-O-methyladenosine-3'-phosphate
  modified_base 21: mod_base = OTHER; note = 2'-deoxy-2'-fluoroadenosine-3'-phosphate ((2S,4R)-1-[29-[[2-(acetylamino)-2-deoxy-beta-D-galactopyra nosyl]oxy]-14,14-bis[[3-[[3-[[5-[[2-(acetylamino)-2-deoxy-b eta-D-galactopyranosyl]oxy]-1-oxopentyl]amino]propyl]amino] -3-oxopropoxy]methyl]-1,12,19,25-tetraoxo-16-oxa-13,20,24-t riazanonacos-1-yl]-4-hydroxy-2-pyrrolidinyl)methyl ester
atgggatttcatgtaaccaaa

SEQ ID NO: 201 - RNA, 21 nt, synthetic construct
  source 1..21: mol_type = other RNA
  modified_base 1: mod_base = OTHER; note = 2'-O-methyladenosine-3'-phosphorothioate
  modified_base 2: mod_base = OTHER; note = 2'-O-methyluridine-3'-phosphorothioate
  modified_base 3: mod_base = OTHER; note = 2'-O-methylguanosine-3'-phosphate
  modified_base 4: mod_base = OTHER; note = 2'-O-methylguanosine-3'-phosphate
  modified_base 5: mod_base = OTHER; note = 2'-O-methylguanosine-3'-phosphate
  modified_base 6: mod_base = OTHER; note = 2'-O-methyladenosine-3'-phosphate
  modified_base 7: mod_base = OTHER; note = 2'-deoxy-2'-fluorouridine-3'-phosphate
  modified_base 8: mod_base = OTHER; note = 2'-O-methyluridine-3'-phosphate
  modified_base 9: mod_base = OTHER; note = 2'-deoxy-2'-fluorouridine-3'-phosphate
  modified_base 10: mod_base = OTHER; note = 2'-deoxy-2'-fluorocytidine-3'-phosphate
  modified_base 11: mod_base = OTHER; note = 2'-deoxy-2'-fluoroadenosine-3'-phosphate
  modified_base 12: mod_base = OTHER; note = 2'-O-methyluridine-3'-phosphate
  modified_base 13: mod_base = OTHER; note = 2'-O-methylguanosine-3'-phosphate
  modified_base 14: mod_base = OTHER; note = 2'-O-methyluridine-3'-phosphate
  modified_base 15: mod_base = OTHER; note = 2'-O-methyladenosine-3'-phosphate
  modified_base 16: mod_base = OTHER; note = 2'-O-methyladenosine-3'-phosphate
  modified_base 17: mod_base = OTHER; note = 2'-O-methylcytidine-3'-phosphate
  modified_base 18: mod_base = OTHER; note = 2'-O-methylcytidine-3'-phosphate
  modified_base 19: mod_base = OTHER; note = 2'-O-methyladenosine-3'-phosphate
  modified_base 20: mod_base = OTHER; note = 2'-O-methyladenosine-3'-phosphate
  modified_base 21: mod_base = OTHER; note = 2'-O-methyladenosine-3'-phosphate ((2S,4R)-1-[29-[[2-(acetylamino)-2-deoxy-beta-D-galactopyra nosyl]oxy]-14,14-bis[[3-[[3-[[5-[[2-(acetylamino)-2-deoxy-b eta-D-galactopyranosyl]oxy]-1-oxopentyl]amino]propyl]amino] -3-oxopropoxy]methyl]-1,12,19,25-tetraoxo-16-oxa-13,20,24-t riazanonacos-1-yl]-4-hydroxy-2-pyrrolidinyl)methyl ester
atgggatttcatgtaaccaaa

SEQ ID NO: 202 - RNA, 21 nt, synthetic construct
  source 1..21: mol_type = other RNA
  modified_base 1: mod_base = OTHER; note = 2'-deoxy-2'-fluorouridine-3'-phosphorothioate
  modified_base 2: mod_base = OTHER; note = 2'-O-methylguanosine-3'-phosphorothioate
  modified_base 3: mod_base = OTHER; note = 2'-deoxy-2'-fluoroguanosine-3'-phosphate
  modified_base 4: mod_base = OTHER; note = 2'-O-methylguanosine-3'-phosphate
  modified_base 5: mod_base = OTHER; note = 2'-deoxy-2'-fluoroadenosine-3'-phosphate
  modified_base 6: mod_base = OTHER; note = 2'-O-methyluridine-3'-phosphate
  modified_base 7: mod_base = OTHER; note = 2'-deoxy-2'-fluorouridine-3'-phosphate
  modified_base 8: mod_base = OTHER; note = 2'-O-methyluridine-3'-phosphate
  modified_base 9: mod_base = OTHER; note = 2'-deoxy-2'-fluorocytidine-3'-phosphate
  modified_base 10: mod_base = OTHER; note = 2'-deoxy-2'-fluoroadenosine-3'-phosphate
  modified_base 11: mod_base = OTHER; note = 2'-deoxy-2'-fluorouridine-3'-phosphate
  modified_base 12: mod_base = OTHER; note = 2'-O-methylguanosine-3'-phosphate
  modified_base 13: mod_base = OTHER; note = 2'-deoxy-2'-fluorouridine-3'-phosphate
  modified_base 14: mod_base = OTHER; note = 2'-O-methyladenosine-3'-phosphate
  modified_base 15: mod_base = OTHER; note = 2'-deoxy-2'-fluoroadenosine-3'-phosphate
  modified_base 16: mod_base = OTHER; note = 2'-O-methylcytidine-3'-phosphate
  modified_base 17: mod_base = OTHER; note = 2'-deoxy-2'-fluorocytidine-3'-phosphate
  modified_base 18: mod_base = OTHER; note = 2'-O-methyladenosine-3'-phosphate
  modified_base 19: mod_base = OTHER; note = 2'-deoxy-2'-fluoroadenosine-3'-phosphate
  modified_base 20: mod_base = OTHER; note = 2'-O-methylguanosine-3'-phosphate
  modified_base 21: mod_base = OTHER; note = 2'-deoxy-2'-fluoroadenosine-3'-phosphate ((2S,4R)-1-[29-[[2-(acetylamino)-2-deoxy-beta-D-galactopyra nosyl]oxy]-14,14-bis[[3-[[3-[[5-[[2-(acetylamino)-2-deoxy-b eta-D-galactopyranosyl]oxy]-1-oxopentyl]amino]propyl]amino] -3-oxopropoxy]methyl]-1,12,19,25-tetraoxo-16-oxa-13,20,24-t riazanonacos-1-yl]-4-hydroxy-2-pyrrolidinyl)methyl ester
tgggatttcatgtaaccaaga

SEQ ID NO: 203 - RNA, 21 nt, synthetic construct
  source 1..21: mol_type = other RNA
  modified_base 1: mod_base = OTHER; note = 2'-O-methyluridine-3'-phosphorothioate
  modified_base 2: mod_base = OTHER; note = 2'-O-methylguanosine-3'-phosphorothioate
  modified_base 3: mod_base = OTHER; note = 2'-O-methylguanosine-3'-phosphate
  modified_base 4: mod_base = OTHER; note = 2'-O-methylguanosine-3'-phosphate
  modified_base 5: mod_base = OTHER; note = 2'-O-methyladenosine-3'-phosphate
  modified_base 6: mod_base = OTHER; note = 2'-O-methyluridine-3'-phosphate
  modified_base 7: mod_base = OTHER; note = 2'-deoxy-2'-fluorouridine-3'-phosphate
  modified_base 8: mod_base = OTHER; note = 2'-O-methyluridine-3'-phosphate
  modified_base 9: mod_base = OTHER; note = 2'-deoxy-2'-fluorocytidine-3'-phosphate
  modified_base 10: mod_base = OTHER; note = 2'-deoxy-2'-fluoroadenosine-3'-phosphate
  modified_base 11: mod_base = OTHER; note = 2'-deoxy-2'-fluorouridine-3'-phosphate
  modified_base 12: mod_base = OTHER; note = 2'-O-methylguanosine-3'-phosphate
  modified_base 13: mod_base = OTHER; note = 2'-O-methyluridine-3'-phosphate
  modified_base 14: mod_base = OTHER; note = 2'-O-methyladenosine-3'-phosphate
  modified_base 15: mod_base = OTHER; note = 2'-O-methyladenosine-3'-phosphate
  modified_base 16: mod_base = OTHER; note = 2'-O-methylcytidine-3'-phosphate
  modified_base 17: mod_base = OTHER; note = 2'-O-methylcytidine-3'-phosphate
  modified_base 18: mod_base = OTHER; note = 2'-O-methyladenosine-3'-phosphate
  modified_base 19: mod_base = OTHER; note = 2'-O-methyladenosine-3'-phosphate
  modified_base 20: mod_base = OTHER; note = 2'-O-methylguanosine-3'-phosphate
  modified_base 21: mod_base = OTHER; note = 2'-O-methyladenosine-3'-phosphate ((2S,4R)-1-[29-[[2-(acetylamino)-2-deoxy-beta-D-galactopyra nosyl]oxy]-14,14-bis[[3-[[3-[[5-[[2-(acetylamino)-2-deoxy-b eta-D-galactopyranosyl]oxy]-1-oxopentyl]amino]propyl]amino] -3-oxopropoxy]methyl]-1,12,19,25-tetraoxo-16-oxa-13,20,24-t riazanonacos-1-yl]-4-hydroxy-2-pyrrolidinyl)methyl ester
tgggatttcatgtaaccaaga

SEQ ID NO: 204 - RNA, 21 nt, synthetic construct
  source 1..21: mol_type = other RNA
  modified_base 1: mod_base = OTHER; note = 2'-O-methyluridine-3'-phosphorothioate
  modified_base 2: mod_base = OTHER; note = 2'-O-methylguanosine-3'-phosphorothioate
  modified_base 3: mod_base = OTHER; note = 2'-O-methylguanosine-3'-phosphate
  modified_base 4: mod_base = OTHER; note = 2'-O-methylguanosine-3'-phosphate
  modified_base 5: mod_base = OTHER; note = 2'-O-methyladenosine-3'-phosphate
  modified_base 6: mod_base = OTHER; note = 2'-O-methyluridine-3'-phosphate
  modified_base 7: mod_base = OTHER; note = 2'-deoxy-2'-fluorouridine-3'-phosphate
  modified_base 8: mod_base = OTHER; note = 2'-O-methyluridine-3'-phosphate
  modified_base 9: mod_base = OTHER; note = 2'-deoxy-2'-fluorocytidine-3'-phosphate
  modified_base 10: mod_base = OTHER; note = 2'-deoxy-2'-fluoroadenosine-3'-phosphate
  modified_base 11: mod_base = OTHER; note = 2'-deoxy-2'-fluorouridine-3'-phosphate
  modified_base 12: mod_base = OTHER; note = 2'-O-methylguanosine-3'-phosphate
  modified_base 13: mod_base = OTHER; note = 2'-O-methyluridine-3'-phosphate
  modified_base 14: mod_base = OTHER; note = 2'-O-methyladenosine-3'-phosphate
  modified_base 15: mod_base = OTHER; note = 2'-O-methyladenosine-3'-phosphate
  modified_base 16: mod_base = OTHER; note = 2'-O-methylcytidine-3'-phosphate
  modified_base 17: mod_base = OTHER; note = 2'-O-methylcytidine-3'-phosphate
  modified_base 18: mod_base = OTHER; note = 2'-O-methyladenosine-3'-phosphate
  modified_base 19: mod_base = OTHER; note = 2'-O-methyladenosine-3'-phosphate
  modified_base 20: mod_base = OTHER; note = 2'-O-methylguanosine-3'-phosphate
  modified_base 21: mod_base = OTHER; note = 2'-O-methyladenosine-3'-phosphate ((2S,4R)-1-[29-[[2-(acetylamino)-2-deoxy-beta-D-galactopyra nosyl]oxy]-14,14-bis[[3-[[3-[[5-[[2-(acetylamino)-2-deoxy-b eta-D-galactopyranosyl]oxy]-1-oxopentyl]amino]propyl]amino] -3-oxopropoxy]methyl]-1,12,19,25-tetraoxo-16-oxa-13,20,24-t riazanonacos-1-yl]-4-hydroxy-2-pyrrolidinyl)methyl ester
tgggatttcatgtaaccaaga

SEQ ID NO: 205 - RNA, 21 nt, synthetic construct
  source 1..21: mol_type = other RNA
  modified_base 1: mod_base = OTHER; note = 2'-O-methyluridine-3'-phosphorothioate
  modified_base 2: mod_base = OTHER; note = 2'-O-methylguanosine-3'-phosphorothioate
  modified_base 3: mod_base = OTHER; note = 2'-O-methylguanosine-3'-phosphate
  modified_base 4: mod_base = OTHER; note = 2'-O-methylguanosine-3'-phosphate
  modified_base 5: mod_base = OTHER; note = 2'-O-methyladenosine-3'-phosphate
  modified_base 6: mod_base = OTHER; note = 2'-O-methyluridine-3'-phosphate
  modified_base 7: mod_base = OTHER; note = 2'-deoxy-2'-fluorouridine-3'-phosphate
  modified_base 8: mod_base = OTHER; note = 2'-O-methyluridine-3'-phosphate
  modified_base 9: mod_base = OTHER; note = 2'-deoxy-2'-fluorocytidine-3'-phosphate
  modified_base 10: mod_base = OTHER; note = 2'-deoxy-2'-fluoroadenosine-3'-phosphate
  modified_base 11: mod_base = OTHER; note = 2'-deoxy-2'-fluorouridine-3'-phosphate
  modified_base 12: mod_base = OTHER; note = 2'-O-methylguanosine-3'-phosphate
  modified_base 13: mod_base = OTHER; note = 2'-O-methyluridine-3'-phosphate
  modified_base 14: mod_base = OTHER; note = 2'-O-methyladenosine-3'-phosphate
  modified_base 15: mod_base = OTHER; note = 2'-O-methyladenosine-3'-phosphate
  modified_base 16: mod_base = OTHER; note = 2'-O-methylcytidine-3'-phosphate
  modified_base 17: mod_base = OTHER; note = 2'-O-methylcytidine-3'-phosphate
  modified_base 18: mod_base = OTHER; note = 2'-O-methyladenosine-3'-phosphate
  modified_base 19: mod_base = OTHER; note = 2'-O-methyladenosine-3'-phosphate
  modified_base 20: mod_base = OTHER; note = 2'-O-methylguanosine-3'-phosphate
  modified_base 21: mod_base = OTHER; note = 2'-O-methyladenosine-3'-phosphate ((2S,4R)-1-[29-[[2-(acetylamino)-2-deoxy-beta-D-galactopyra nosyl]oxy]-14,14-bis[[3-[[3-[[5-[[2-(acetylamino)-2-deoxy-b eta-D-galactopyranosyl]oxy]-1-oxopentyl]amino]propyl]amino] -3-oxopropoxy]methyl]-1,12,19,25-tetraoxo-16-oxa-13,20,24-t riazanonacos-1-yl]-4-hydroxy-2-pyrrolidinyl)methyl ester
tgggatttcatgtaaccaaga

SEQ ID NO: 206 - RNA, 21 nt, synthetic construct
  source 1..21: mol_type = other RNA
  modified_base 1: mod_base = OTHER; note = 2'-deoxy-2'-fluorouridine-3'-phosphorothioate
  modified_base 2: mod_base = OTHER; note = 2'-O-methyluridine-3'-phosphorothioate
  modified_base 3: mod_base = OTHER; note = 2'-deoxy-2'-fluorouridine-3'-phosphate
  modified_base 4: mod_base = OTHER; note = 2'-O-methylcytidine-3'-phosphate
  modified_base 5: mod_base = OTHER; note = 2'-deoxy-2'-fluoroadenosine-3'-phosphate
  modified_base 6: mod_base = OTHER; note = 2'-O-methyluridine-3'-phosphate
  modified_base 7: mod_base = OTHER; note = 2'-deoxy-2'-fluoroguanosine-3'-phosphate
  modified_base 8: mod_base = OTHER; note = 2'-O-methyluridine-3'-phosphate
  modified_base 9: mod_base = OTHER; note = 2'-deoxy-2'-fluoroadenosine-3'-phosphate
  modified_base 10: mod_base = OTHER; note = 2'-deoxy-2'-fluoroadenosine-3'-phosphate
  modified_base 11: mod_base = OTHER; note = 2'-deoxy-2'-fluorocytidine-3'-phosphate
  modified_base 12: mod_base = OTHER; note = 2'-O-methylcytidine-3'-phosphate
  modified_base 13: mod_base = OTHER; note = 2'-deoxy-2'-fluoroadenosine-3'-phosphate
  modified_base 14: mod_base = OTHER; note = 2'-O-methyladenosine-3'-phosphate
  modified_base 15: mod_base = OTHER; note = 2'-deoxy-2'-fluoroguanosine-3'-phosphate
  modified_base 16: mod_base = OTHER; note = 2'-O-methyladenosine-3'-phosphate
  modified_base 17: mod_base = OTHER; note = 2'-deoxy-2'-fluoroguanosine-3'-phosphate
  modified_base 18: mod_base = OTHER; note = 2'-O-methyluridine-3'-phosphate
  modified_base 19: mod_base = OTHER; note = 2'-deoxy-2'-fluoroadenosine-3'-phosphate
  modified_base 20: mod_base = OTHER; note = 2'-O-methyluridine-3'-phosphate
  modified_base 21: mod_base = OTHER; note = 2'-deoxy-2'-fluorouridine-3'-phosphate ((2S,4R)-1-[29-[[2-(acetylamino)-2-deoxy-beta-D-galactopyra nosyl]oxy]-14,14-bis[[3-[[3-[[5-[[2-(acetylamino)-2-deoxy-b eta-D-galactopyranosyl]oxy]-1-oxopentyl]amino]propyl]amino] -3-oxopropoxy]methyl]-1,12,19,25-tetraoxo-16-oxa-13,20,24-t riazanonacos-1-yl]-4-hydroxy-2-pyrrolidinyl)methyl ester
tttcatgtaaccaagagtatt

SEQ ID NO: 207 - RNA, 21 nt, synthetic construct
  source 1..21: mol_type = other RNA
  modified_base 1: mod_base = OTHER; note = 2'-O-methyluridine-3'-phosphorothioate
  modified_base 2: mod_base = OTHER; note = 2'-O-methyluridine-3'-phosphorothioate
  modified_base 3: mod_base = OTHER; note = 2'-O-methyluridine-3'-phosphate
  modified_base 4: mod_base = OTHER; note = 2'-O-methylcytidine-3'-phosphate
  modified_base 5: mod_base = OTHER; note = 2'-O-methyladenosine-3'-phosphate
  modified_base 6: mod_base = OTHER; note = 2'-O-methyluridine-3'-phosphate
  modified_base 7: mod_base = OTHER; note = 2'-deoxy-2'-fluoroguanosine-3'-phosphate
  modified_base 8: mod_base = OTHER; note = 2'-O-methyluridine-3'-phosphate
  modified_base 9: mod_base = OTHER; note = 2'-deoxy-2'-fluoroadenosine-3'-phosphate
  modified_base 10: mod_base = OTHER; note = 2'-deoxy-2'-fluoroadenosine-3'-phosphate
  modified_base 11: mod_base = OTHER; note = 2'-deoxy-2'-fluorocytidine-3'-phosphate
  modified_base 12: mod_base = OTHER; note = 2'-O-methylcytidine-3'-phosphate
  modified_base 13: mod_base = OTHER; note = 2'-O-methyladenosine-3'-phosphate
  modified_base 14: mod_base = OTHER; note = 2'-O-methyladenosine-3'-phosphate
  modified_base 15: mod_base = OTHER; note = 2'-O-methylguanosine-3'-phosphate
  modified_base 16: mod_base = OTHER; note = 2'-O-methyladenosine-3'-phosphate
  modified_base 17: mod_base = OTHER; note = 2'-O-methylguanosine-3'-phosphate
  modified_base 18: mod_base = OTHER; note = 2'-O-methyluridine-3'-phosphate
  modified_base 19: mod_base = OTHER; note = 2'-O-methyladenosine-3'-phosphate
  modified_base 20: mod_base = OTHER; note = 2'-O-methyluridine-3'-phosphate
  modified_base 21: mod_base = OTHER; note = 2'-O-methyluridine-3'-phosphate ((2S,4R)-1-[29-[[2-(acetylamino)-2-deoxy-beta-D-galactopyra nosyl]oxy]-14,14-bis[[3-[[3-[[5-[[2-(acetylamino)-2-deoxy-b eta-D-galactopyranosyl]oxy]-1-oxopentyl]amino]propyl]amino] -3-oxopropoxy]methyl]-1,12,19,25-tetraoxo-16-oxa-13,20,24-t riazanonacos-1-yl]-4-hydroxy-2-pyrrolidinyl)methyl ester
tttcatgtaaccaagagtatt

SEQ ID NO: 208 - RNA, 21 nt, synthetic construct
  source 1..21: mol_type = other RNA
  modified_base 1: mod_base = OTHER; note = 2'-O-methyluridine-3'-phosphorothioate
  modified_base 2: mod_base = OTHER; note = 2'-O-methyluridine-3'-phosphorothioate
  modified_base 3: mod_base = OTHER; note = 2'-O-methyluridine-3'-phosphate
  modified_base 4: mod_base = OTHER; note = 2'-O-methylcytidine-3'-phosphate
  modified_base 5: mod_base = OTHER; note = 2'-O-methyladenosine-3'-phosphate
  modified_base 6: mod_base = OTHER; note = 2'-O-methyluridine-3'-phosphate
  modified_base 7: mod_base = OTHER; note = 2'-deoxy-2'-fluoroguanosine-3'-phosphate
  modified_base 8: mod_base = OTHER; note = 2'-O-methyluridine-3'-phosphate
  modified_base 9: mod_base = OTHER; note = 2'-deoxy-2'-fluoroadenosine-3'-phosphate
  modified_base 10: mod_base = OTHER; note = 2'-deoxy-2'-fluoroadenosine-3'-phosphate
  modified_base 11: mod_base = OTHER; note = 2'-deoxy-2'-fluorocytidine-3'-phosphate
  modified_base 12: mod_base = OTHER; note = 2'-O-methylcytidine-3'-phosphate
  modified_base 13: mod_base = OTHER; note = 2'-O-methyladenosine-3'-phosphate
  modified_base 14: mod_base = OTHER; note = 2'-O-methyladenosine-3'-phosphate
  modified_base 15: mod_base = OTHER; note = 2'-O-methylguanosine-3'-phosphate
  modified_base 16: mod_base = OTHER; note = 2'-O-methyladenosine-3'-phosphate
  modified_base 17: mod_base = OTHER; note = 2'-O-methylguanosine-3'-phosphate
  modified_base 18: mod_base = OTHER; note = 2'-O-methyluridine-3'-phosphate
  modified_base 19: mod_base = OTHER; note = 2'-O-methyladenosine-3'-phosphate
  modified_base 20: mod_base = OTHER; note = 2'-O-methyluridine-3'-phosphate
  modified_base 21: mod_base = OTHER; note = 2'-O-methyluridine-3'-phosphate ((2S,4R)-1-[29-[[2-(acetylamino)-2-deoxy-beta-D-galactopyra nosyl]oxy]-14,14-bis[[3-[[3-[[5-[[2-(acetylamino)-2-deoxy-b eta-D-galactopyranosyl]oxy]-1-oxopentyl]amino]propyl]amino] -3-oxopropoxy]methyl]-1,12,19,25-tetraoxo-16-oxa-13,20,24-t riazanonacos-1-yl]-4-hydroxy-2-pyrrolidinyl)methyl ester
tttcatgtaaccaagagtatt

SEQ ID NO: 209 - RNA, 21 nt, synthetic construct
  source 1..21: mol_type = other RNA
  modified_base 1: mod_base = OTHER; note = 2'-deoxy-2'-fluorouridine-3'-phosphorothioate
  modified_base 2: mod_base = OTHER; note = 2'-O-methylguanosine-3'-phosphorothioate
  modified_base 3: mod_base = OTHER; note = 2'-deoxy-2'-fluorouridine-3'-phosphate
  modified_base 4: mod_base = OTHER; note = 2'-O-methyladenosine-3'-phosphate
  modified_base 5: mod_base = OTHER; note = 2'-deoxy-2'-fluoroadenosine-3'-phosphate
  modified_base 6: mod_base = OTHER; note = 2'-O-methylcytidine-3'-phosphate
  modified_base 7: mod_base = OTHER; note = 2'-deoxy-2'-fluorocytidine-3'-phosphate
  modified_base 8: mod_base = OTHER; note = 2'-O-methyladenosine-3'-phosphate
  modified_base 9: mod_base = OTHER; note = 2'-deoxy-2'-fluoroadenosine-3'-phosphate
  modified_base 10: mod_base = OTHER; note = 2'-deoxy-2'-fluoroguanosine-3'-phosphate
  modified_base 11: mod_base = OTHER; note = 2'-deoxy-2'-fluoroadenosine-3'-phosphate
  modified_base 12: mod_base = OTHER; note = 2'-O-methylguanosine-3'-phosphate
  modified_base 13: mod_base = OTHER; note = 2'-deoxy-2'-fluorouridine-3'-phosphate
  modified_base 14: mod_base = OTHER; note = 2'-O-methyladenosine-3'-phosphate
  modified_base 15: mod_base = OTHER; note = 2'-deoxy-2'-fluorouridine-3'-phosphate
  modified_base 16: mod_base = OTHER; note = 2'-O-methyluridine-3'-phosphate
  modified_base 17: mod_base = OTHER; note = 2'-deoxy-2'-fluorocytidine-3'-phosphate
  modified_base 18: mod_base = OTHER; note = 2'-O-methylcytidine-3'-phosphate
  modified_base 19: mod_base = OTHER; note = 2'-deoxy-2'-fluoroadenosine-3'-phosphate
  modified_base 20: mod_base = OTHER; note = 2'-O-methyluridine-3'-phosphate
  modified_base 21: mod_base = OTHER; note = 2'-deoxy-2'-fluorouridine-3'-phosphate ((2S,4R)-1-[29-[[2-(acetylamino)-2-deoxy-beta-D-galactopyra nosyl]oxy]-14,14-bis[[3-[[3-[[5-[[2-(acetylamino)-2-deoxy-b eta-D-galactopyranosyl]oxy]-1-oxopentyl]amino]propyl]amino] -3-oxopropoxy]methyl]-1,12,19,25-tetraoxo-16-oxa-13,20,24-t riazanonacos-1-yl]-4-hydroxy-2-pyrrolidinyl)methyl ester
tgtaaccaagagtattccatt

SEQ ID NO: 210 - RNA, 21 nt, synthetic construct
  source 1..21: mol_type = other RNA
  modified_base 1: mod_base = OTHER; note = 2'-O-methyluridine-3'-phosphorothioate
  modified_base 2: mod_base = OTHER; note = 2'-O-methylguanosine-3'-phosphorothioate
  modified_base 3: mod_base = OTHER; note = 2'-O-methyluridine-3'-phosphate
  modified_base 4: mod_base = OTHER; note = 2'-O-methyladenosine-3'-phosphate
  modified_base 5: mod_base = OTHER; note = 2'-O-methyladenosine-3'-phosphate
  modified_base 6: mod_base = OTHER; note = 2'-O-methylcytidine-3'-phosphate
  modified_base 7: mod_base = OTHER; note = 2'-deoxy-2'-fluorocytidine-3'-phosphate
  modified_base 8: mod_base = OTHER; note = 2'-O-methyladenosine-3'-phosphate
  modified_base 9: mod_base = OTHER; note = 2'-deoxy-2'-fluoroadenosine-3'-phosphate
  modified_base 10: mod_base = OTHER; note = 2'-deoxy-2'-fluoroguanosine-3'-phosphate
  modified_base 11: mod_base = OTHER; note = 2'-deoxy-2'-fluoroadenosine-3'-phosphate
  modified_base 12: mod_base = OTHER; note = 2'-O-methylguanosine-3'-phosphate
  modified_base 13: mod_base = OTHER; note = 2'-O-methyluridine-3'-phosphate
  modified_base 14: mod_base = OTHER; note = 2'-O-methyladenosine-3'-phosphate
  modified_base 15: mod_base = OTHER; note = 2'-O-methyluridine-3'-phosphate
  modified_base 16: mod_base = OTHER; note = 2'-O-methyluridine-3'-phosphate
  modified_base 17: mod_base = OTHER; note = 2'-O-methylcytidine-3'-phosphate
  modified_base 18: mod_base = OTHER; note = 2'-O-methylcytidine-3'-phosphate
  modified_base 19: mod_base = OTHER; note = 2'-O-methyladenosine-3'-phosphate
  modified_base 20: mod_base = OTHER; note = 2'-O-methyluridine-3'-phosphate
  modified_base 21: mod_base = OTHER; note = 2'-O-methyluridine-3'-phosphate ((2S,4R)-1-[29-[[2-(acetylamino)-2-deoxy-beta-D-galactopyra nosyl]oxy]-14,14-bis[[3-[[3-[[5-[[2-(acetylamino)-2-deoxy-b eta-D-galactopyranosyl]oxy]-1-oxopentyl]amino]propyl]amino] -3-oxopropoxy]methyl]-1,12,19,25-tetraoxo-16-oxa-13,20,24-t riazanonacos-1-yl]-4-hydroxy-2-pyrrolidinyl)methyl ester
tgtaaccaagagtattccatt

SEQ ID NO: 211 - RNA, 21 nt, synthetic construct
  source 1..21: mol_type = other RNA
  modified_base 1: mod_base = OTHER; note = 2'-O-methyluridine-3'-phosphorothioate
  modified_base 2: mod_base = OTHER; note = 2'-O-methylguanosine-3'-phosphorothioate
  modified_base 3: mod_base = OTHER; note = 2'-O-methyluridine-3'-phosphate
  modified_base 4: mod_base = OTHER; note = 2'-O-methyladenosine-3'-phosphate
  modified_base 5: mod_base = OTHER; note = 2'-O-methyladenosine-3'-phosphate
  modified_base 6: mod_base = OTHER; note = 2'-O-methylcytidine-3'-phosphate
  modified_base 7: mod_base = OTHER; note = 2'-deoxy-2'-fluorocytidine-3'-phosphate
  modified_base 8: mod_base = OTHER; note = 2'-O-methyladenosine-3'-phosphate
  modified_base 9: mod_base = OTHER; note = 2'-deoxy-2'-fluoroadenosine-3'-phosphate
  modified_base 10: mod_base = OTHER; note = 2'-deoxy-2'-fluoroguanosine-3'-phosphate
  modified_base 11: mod_base = OTHER; note = 2'-deoxy-2'-fluoroadenosine-3'-phosphate
  modified_base 12: mod_base = OTHER; note = 2'-O-methylguanosine-3'-phosphate
  modified_base 13: mod_base = OTHER; note = 2'-O-methyluridine-3'-phosphate
  modified_base 14: mod_base = OTHER; note = 2'-O-methyladenosine-3'-phosphate
  modified_base 15: mod_base = OTHER; note = 2'-O-methyluridine-3'-phosphate
  modified_base 16: mod_base = OTHER; note = 2'-O-methyluridine-3'-phosphate
  modified_base 17: mod_base = OTHER; note = 2'-O-methylcytidine-3'-phosphate
  modified_base 18: mod_base = OTHER; note = 2'-O-methylcytidine-3'-phosphate
  modified_base 19: mod_base = OTHER; note = 2'-O-methyladenosine-3'-phosphate
  modified_base 20: mod_base = OTHER; note = 2'-O-methyluridine-3'-phosphate
  modified_base 21: mod_base = OTHER; note = 2'-O-methyluridine-3'-phosphate ((2S,4R)-1-[29-[[2-(acetylamino)-2-deoxy-beta-D-galactopyra nosyl]oxy]-14,14-bis[[3-[[3-[[5-[[2-(acetylamino)-2-deoxy-b eta-D-galactopyranosyl]oxy]-1-oxopentyl]amino]propyl]amino] -3-oxopropoxy]methyl]-1,12,19,25-tetraoxo-16-oxa-13,20,24-t riazanonacos-1-yl]-4-hydroxy-2-pyrrolidinyl)methyl ester
tgtaaccaagagtattccatt

SEQ ID NO: 212 - RNA, 21 nt, synthetic construct
  source 1..21: mol_type = other RNA
  modified_base 1: mod_base = OTHER; note = 2'-O-methyladenosine-3'-phosphorothioate
  modified_base 2: mod_base = OTHER; note = 2'-O-methyladenosine-3'-phosphorothioate
  modified_base 3: mod_base = OTHER; note = 2'-O-methylcytidine-3'-phosphate
  modified_base 4: mod_base = OTHER; note = 2'-O-methylcytidine-3'-phosphate
  modified_base 5: mod_base = OTHER; note = 2'-O-methyladenosine-3'-phosphate
  modified_base 6: mod_base = OTHER; note = 2'-O-methyladenosine-3'-phosphate
  modified_base 7: mod_base = OTHER; note = 2'-deoxy-2'-fluoroguanosine-3'-phosphate
  modified_base 8: mod_base = OTHER; note = 2'-O-methyladenosine-3'-phosphate
  modified_base 9: mod_base = OTHER; note = 2'-deoxy-2'-fluoroguanosine-3'-phosphate
  modified_base 10: mod_base = OTHER; note = 2'-deoxy-2'-fluorouridine-3'-phosphate
  modified_base 11: mod_base = OTHER; note = 2'-deoxy-2'-fluoroadenosine-3'-phosphate
  modified_base 12: mod_base = OTHER; note = 2'-O-methyluridine-3'-phosphate
  modified_base 13: mod_base = OTHER; note = 2'-O-methyluridine-3'-phosphate
  modified_base 14: mod_base = OTHER; note = 2'-O-methylcytidine-3'-phosphate
  modified_base 15: mod_base = OTHER; note = 2'-O-methylcytidine-3'-phosphate
  modified_base 16: mod_base = OTHER; note = 2'-O-methyladenosine-3'-phosphate
  modified_base 17: mod_base = OTHER; note = 2'-O-methyluridine-3'-phosphate
  modified_base 18: mod_base = OTHER; note = 2'-O-methyluridine-3'-phosphate
  modified_base 19: mod_base = OTHER; note = 2'-O-methyluridine-3'-phosphate
  modified_base 20: mod_base = OTHER; note = 2'-O-methyluridine-3'-phosphate
  modified_base 21: mod_base = OTHER; note = 2'-O-methyluridine-3'-phosphate ((2S,4R)-1-[29-[[2-(acetylamino)-2-deoxy-beta-D-galactopyra nosyl]oxy]-14,14-bis[[3-[[3-[[5-[[2-(acetylamino)-2-deoxy-b eta-D-galactopyranosyl]oxy]-1-oxopentyl]amino]propyl]amino] -3-oxopropoxy]methyl]-1,12,19,25-tetraoxo-16-oxa-13,20,24-t riazanonacos-1-yl]-4-hydroxy-2-pyrrolidinyl)methyl ester
aaccaagagtattccattttt

SEQ ID NO: 213 - RNA, 21 nt, synthetic construct
  source 1..21: mol_type = other RNA
  modified_base 1: mod_base = OTHER; note = 2'-deoxy-2'-fluoroadenosine-3'-phosphorothioate
  modified_base 2: mod_base = OTHER; note = 2'-O-methyladenosine-3'-phosphorothioate
  modified_base 3: mod_base = OTHER; note = 2'-deoxy-2'-fluorocytidine-3'-phosphate
  modified_base 4: mod_base = OTHER; note = 2'-O-methylcytidine-3'-phosphate
  modified_base 5: mod_base = OTHER; note = 2'-deoxy-2'-fluoroadenosine-3'-phosphate
  modified_base 6: mod_base = OTHER; note = 2'-O-methyladenosine-3'-phosphate
  modified_base 7: mod_base = OTHER; note = 2'-deoxy-2'-fluoroguanosine-3'-phosphate
  modified_base 8: mod_base = OTHER; note = 2'-O-methyladenosine-3'-phosphate
  modified_base 9: mod_base = OTHER; note = 2'-deoxy-2'-fluoroguanosine-3'-phosphate
  modified_base 10: mod_base = OTHER; note = 2'-deoxy-2'-fluorouridine-3'-phosphate
  modified_base 11: mod_base = OTHER; note = 2'-deoxy-2'-fluoroadenosine-3'-phosphate
  modified_base 12: mod_base = OTHER; note = 2'-O-methyluridine-3'-phosphate
  modified_base 13: mod_base = OTHER; note = 2'-deoxy-2'-fluorouridine-3'-phosphate
  modified_base 14: mod_base = OTHER; note = 2'-O-methylcytidine-3'-phosphate
  modified_base 15: mod_base = OTHER; note = 2'-deoxy-2'-fluorocytidine-3'-phosphate
  modified_base 16: mod_base = OTHER; note = 2'-O-methyladenosine-3'-phosphate
  modified_base 17: mod_base = OTHER; note = 2'-deoxy-2'-fluorouridine-3'-phosphate
  modified_base 18: mod_base = OTHER; note = 2'-O-methyluridine-3'-phosphate
  modified_base 19: mod_base = OTHER; note = 2'-deoxy-2'-fluorouridine-3'-phosphate
  modified_base 20: mod_base = OTHER; note = 2'-O-methyluridine-3'-phosphate
  modified_base 21: mod_base = OTHER; note = 2'-deoxy-2'-fluorouridine-3'-phosphate ((2S,4R)-1-[29-[[2-(acetylamino)-2-deoxy-beta-D-galactopyra nosyl]oxy]-14,14-bis[[3-[[3-[[5-[[2-(acetylamino)-2-deoxy-b eta-D-galactopyranosyl]oxy]-1-oxopentyl]amino]propyl]amino] -3-oxopropoxy]methyl]-1,12,19,25-tetraoxo-16-oxa-13,20,24-t riazanonacos-1-yl]-4-hydroxy-2-pyrrolidinyl)methyl ester
aaccaagagtattccattttt

SEQ ID NO: 214 - RNA, 21 nt, synthetic construct
  source 1..21: mol_type = other RNA
  modified_base 1: mod_base = OTHER; note = 2'-O-methyladenosine-3'-phosphorothioate
  modified_base 2: mod_base = OTHER; note = 2'-O-methyladenosine-3'-phosphorothioate
  modified_base 3: mod_base = OTHER; note = 2'-O-methylcytidine-3'-phosphate
  modified_base 4: mod_base = OTHER; note = 2'-O-methylcytidine-3'-phosphate
  modified_base 5: mod_base = OTHER; note = 2'-O-methyladenosine-3'-phosphate
  modified_base 6: mod_base = OTHER; note = 2'-O-methyladenosine-3'-phosphate
  modified_base 7: mod_base = OTHER; note = 2'-deoxy-2'-fluoroguanosine-3'-phosphate
  modified_base 8: mod_base = OTHER; note = 2'-O-methyladenosine-3'-phosphate
  modified_base 9: mod_base = OTHER; note = 2'-deoxy-2'-fluoroguanosine-3'-phosphate
  modified_base 10: mod_base = OTHER; note = 2'-deoxy-2'-fluorouridine-3'-phosphate
  modified_base 11: mod_base = OTHER; note = 2'-deoxy-2'-fluoroadenosine-3'-phosphate
  modified_base 12: mod_base = OTHER; note = 2'-O-methyluridine-3'-phosphate
  modified_base 13: mod_base = OTHER; note = 2'-O-methyluridine-3'-phosphate
  modified_base 14: mod_base = OTHER; note = 2'-O-methylcytidine-3'-phosphate
  modified_base 15: mod_base = OTHER; note = 2'-O-methylcytidine-3'-phosphate
  modified_base 16: mod_base = OTHER; note = 2'-O-methyladenosine-3'-phosphate
  modified_base 17: mod_base = OTHER; note = 2'-O-methyluridine-3'-phosphate
  modified_base 18: mod_base = OTHER; note = 2'-O-methyluridine-3'-phosphate
  modified_base 19: mod_base = OTHER; note = 2'-O-methyluridine-3'-phosphate
  modified_base 20: mod_base = OTHER; note = 2'-O-methyluridine-3'-phosphate
  modified_base 21: mod_base = OTHER; note = 2'-O-methyluridine-3'-phosphate ((2S,4R)-1-[29-[[2-(acetylamino)-2-deoxy-beta-D-galactopyra nosyl]oxy]-14,14-bis[[3-[[3-[[5-[[2-(acetylamino)-2-deoxy-b eta-D-galactopyranosyl]oxy]-1-oxopentyl]amino]propyl]amino] -3-oxopropoxy]methyl]-1,12,19,25-tetraoxo-16-oxa-13,20,24-t riazanonacos-1-yl]-4-hydroxy-2-pyrrolidinyl)methyl ester
aaccaagagtattccattttt

SEQ ID NO: 215 - RNA, 21 nt, synthetic construct
  source 1..21: mol_type = other RNA
  modified_base 1: mod_base = OTHER; note = 2'-deoxy-2'-fluorouridine-3'-phosphorothioate
  modified_base 2: mod_base = OTHER; note = 2'-O-methyluridine-3'-phosphorothioate
  modified_base 3: mod_base = OTHER; note = 2'-deoxy-2'-fluorouridine-3'-phosphate
  modified_base 4: mod_base = OTHER; note = 2'-O-methyluridine-3'-phosphate
  modified_base 5: mod_base = OTHER; note = 2'-deoxy-2'-fluorouridine-3'-phosphate
  modified_base 6: mod_base = OTHER; note = 2'-O-methyladenosine-3'-phosphate
  modified_base 7: mod_base = OTHER; note = 2'-deoxy-2'-fluorocytidine-3'-phosphate
  modified_base 8: mod_base = OTHER; note = 2'-O-methyluridine-3'-phosphate
  modified_base 9: mod_base = OTHER; note = 2'-deoxy-2'-fluoroadenosine-3'-phosphate
  modified_base 10: mod_base = OTHER; note = 2'-deoxy-2'-fluoroadenosine-3'-phosphate
  modified_base 11: mod_base = OTHER; note = 2'-deoxy-2'-fluoroadenosine-3'-phosphate
  modified_base 12: mod_base = OTHER; note = 2'-O-methylguanosine-3'-phosphate
  modified_base 13: mod_base = OTHER; note = 2'-deoxy-2'-fluorocytidine-3'-phosphate
  modified_base 14: mod_base = OTHER; note = 2'-O-methyladenosine-3'-phosphate
  modified_base 15: mod_base = OTHER; note = 2'-deoxy-2'-fluoroguanosine-3'-phosphate
  modified_base 16: mod_base = OTHER; note = 2'-O-methyluridine-3'-phosphate
  modified_base 17: mod_base = OTHER; note = 2'-deoxy-2'-fluoroguanosine-3'-phosphate
  modified_base 18: mod_base = OTHER; note = 2'-O-methyluridine-3'-phosphate
  modified_base 19: mod_base = OTHER; note = 2'-deoxy-2'-fluorouridine-3'-phosphate
  modified_base 20: mod_base = OTHER; note = 2'-O-methyluridine-3'-phosphate
  modified_base 21: mod_base = OTHER; note = 2'-deoxy-2'-fluorouridine-3'-phosphate ((2S,4R)-1-[29-[[2-(acetylamino)-2-deoxy-beta-D-galactopyra nosyl]oxy]-14,14-bis[[3-[[3-[[5-[[2-(acetylamino)-2-deoxy-b eta-D-galactopyranosyl]oxy]-1-oxopentyl]amino]propyl]amino] -3-oxopropoxy]methyl]-1,12,19,25-tetraoxo-16-oxa-13,20,24-t riazanonacos-1-yl]-4-hydroxy-2-pyrrolidinyl)methyl ester
tttttactaaagcagtgtttt

SEQ ID NO: 216 - RNA, 21 nt, synthetic construct
  source 1..21: mol_type = other RNA
  modified_base 1: mod_base = OTHER; note = 2'-O-methyluridine-3'-phosphorothioate
  modified_base 2: mod_base = OTHER; note = 2'-O-methyluridine-3'-phosphorothioate
  modified_base 3: mod_base = OTHER; note = 2'-O-methyluridine-3'-phosphate
  modified_base 4: mod_base = OTHER; note = 2'-O-methyluridine-3'-phosphate
  modified_base 5: mod_base = OTHER; note = 2'-O-methyluridine-3'-phosphate
  modified_base 6: mod_base = OTHER; note = 2'-O-methyladenosine-3'-phosphate
  modified_base 7: mod_base = OTHER; note = 2'-deoxy-2'-fluorocytidine-3'-phosphate
  modified_base 8: mod_base = OTHER; note = 2'-O-methyluridine-3'-phosphate
  modified_base 9: mod_base = OTHER; note = 2'-deoxy-2'-fluoroadenosine-3'-phosphate
  modified_base 10: mod_base = OTHER; note = 2'-deoxy-2'-fluoroadenosine-3'-phosphate
  modified_base 11: mod_base = OTHER; note = 2'-deoxy-2'-fluoroadenosine-3'-phosphate
  modified_base 12: mod_base = OTHER; note = 2'-O-methylguanosine-3'-phosphate
  modified_base 13: mod_base = OTHER; note = 2'-O-methylcytidine-3'-phosphate
  modified_base 14: mod_base = OTHER; note = 2'-O-methyladenosine-3'-phosphate
  modified_base 15: mod_base = OTHER; note = 2'-O-methylguanosine-3'-phosphate
  modified_base 16: mod_base = OTHER; note = 2'-O-methyluridine-3'-phosphate
  modified_base 17: mod_base = OTHER; note = 2'-O-methylguanosine-3'-phosphate
  modified_base 18: mod_base = OTHER; note = 2'-O-methyluridine-3'-phosphate
  modified_base 19: mod_base = OTHER; note = 2'-O-methyluridine-3'-phosphate
  modified_base 20: mod_base = OTHER; note = 2'-O-methyluridine-3'-phosphate
  modified_base 21: mod_base = OTHER; note = 2'-O-methyluridine-3'-phosphate ((2S,4R)-1-[29-[[2-(acetylamino)-2-deoxy-beta-D-galactopyra nosyl]oxy]-14,14-bis[[3-[[3-[[5-[[2-(acetylamino)-2-deoxy-b eta-D-galactopyranosyl]oxy]-1-oxopentyl]amino]propyl]amino] -3-oxopropoxy]methyl]-1,12,19,25-tetraoxo-16-oxa-13,20,24-t riazanonacos-1-yl]-4-hydroxy-2-pyrrolidinyl)methyl ester
tttttactaaagcagtgtttt

SEQ ID NO: 217 - RNA, 21 nt, synthetic construct
  source 1..21: mol_type = other RNA
  modified_base 1: mod_base = OTHER; note = 2'-O-methyluridine-3'-phosphorothioate
  modified_base 2: mod_base = OTHER; note = 2'-O-methyluridine-3'-phosphorothioate
  modified_base 3: mod_base = OTHER; note = 2'-O-methyluridine-3'-phosphate
  modified_base 4: mod_base = OTHER; note = 2'-O-methyluridine-3'-phosphate
  modified_base 5: mod_base = OTHER; note = 2'-O-methyluridine-3'-phosphate
  modified_base 6: mod_base = OTHER; note = 2'-O-methyladenosine-3'-phosphate
  modified_base 7: mod_base = OTHER; note = 2'-deoxy-2'-fluorocytidine-3'-phosphate
  modified_base 8: mod_base = OTHER; note = 2'-O-methyluridine-3'-phosphate
  modified_base 9: mod_base = OTHER; note = 2'-deoxy-2'-fluoroadenosine-3'-phosphate
  modified_base 10: mod_base = OTHER; note = 2'-deoxy-2'-fluoroadenosine-3'-phosphate
  modified_base 11: mod_base = OTHER; note = 2'-deoxy-2'-fluoroadenosine-3'-phosphate
  modified_base 12: mod_base = OTHER; note = 2'-O-methylguanosine-3'-phosphate
  modified_base 13: mod_base = OTHER; note = 2'-O-methylcytidine-3'-phosphate
  modified_base 14: mod_base = OTHER; note = 2'-O-methyladenosine-3'-phosphate
  modified_base 15: mod_base = OTHER; note = 2'-O-methylguanosine-3'-phosphate
  modified_base 16: mod_base = OTHER; note = 2'-O-methyluridine-3'-phosphate
  modified_base 17: mod_base = OTHER; note = 2'-O-methylguanosine-3'-phosphate
  modified_base 18: mod_base = OTHER; note = 2'-O-methyluridine-3'-phosphate
  modified_base 19: mod_base = OTHER; note = 2'-O-methyluridine-3'-phosphate
  modified_base 20: mod_base = OTHER; note = 2'-O-methyluridine-3'-phosphate
  modified_base 21: mod_base = OTHER; note = 2'-O-methyluridine-3'-phosphate ((2S,4R)-1-[29-[[2-(acetylamino)-2-deoxy-beta-D-galactopyra nosyl]oxy]-14,14-bis[[3-[[3-[[5-[[2-(acetylamino)-2-deoxy-b eta-D-galactopyranosyl]oxy]-1-oxopentyl]amino]propyl]amino] -3-oxopropoxy]methyl]-1,12,19,25-tetraoxo-16-oxa-13,20,24-t riazanonacos-1-yl]-4-hydroxy-2-pyrrolidinyl)methyl ester
tttttactaaagcagtgtttt

SEQ ID NO: 218 - RNA, 21 nt, synthetic construct
  source 1..21: mol_type = other RNA
  modified_base 1: mod_base = OTHER; note = 2'-deoxy-2'-fluorouridine-3'-phosphorothioate
  modified_base 2: mod_base = OTHER; note = 2'-O-methyluridine-3'-phosphorothioate
  modified_base 3: mod_base = OTHER; note = 2'-deoxy-2'-fluoroadenosine-3'-phosphate
  modified_base 4: mod_base = OTHER; note = 2'-O-methylcytidine-3'-phosphate
  modified_base 5: mod_base = OTHER; note = 2'-deoxy-2'-fluorouridine-3'-phosphate
  modified_base 6: mod_base = OTHER; note = 2'-O-methyladenosine-3'-phosphate
  modified_base 7: mod_base = OTHER; note = 2'-deoxy-2'-fluoroadenosine-3'-phosphate
  modified_base 8: mod_base = OTHER; note = 2'-O-methyladenosine-3'-phosphate
  modified_base 9: mod_base = OTHER; note = 2'-deoxy-2'-fluoroguanosine-3'-phosphate
  modified_base 10: mod_base = OTHER; note = 2'-deoxy-2'-fluorocytidine-3'-phosphate
  modified_base 11: mod_base = OTHER; note = 2'-deoxy-2'-fluoroadenosine-3'-phosphate
  modified_base 12: mod_base = OTHER; note = 2'-O-methylguanosine-3'-phosphate
  modified_base 13: mod_base = OTHER; note = 2'-deoxy-2'-fluorouridine-3'-phosphate
  modified_base 14: mod_base = OTHER; note = 2'-O-methylguanosine-3'-phosphate
  modified_base 15: mod_base = OTHER; note = 2'-deoxy-2'-fluorouridine-3'-phosphate
  modified_base 16: mod_base = OTHER; note = 2'-O-methyluridine-3'-phosphate
  modified_base 17: mod_base = OTHER; note = 2'-deoxy-2'-fluorouridine-3'-phosphate
  modified_base 18: mod_base = OTHER; note = 2'-O-methyluridine-3'-phosphate
  modified_base 19: mod_base = OTHER; note = 2'-deoxy-2'-fluorocytidine-3'-phosphate
  modified_base 20: mod_base = OTHER; note = 2'-O-methyladenosine-3'-phosphate
  modified_base 21: mod_base = OTHER; note = 2'-deoxy-2'-fluoroadenosine-3'-phosphate ((2S,4R)-1-[29-[[2-(acetylamino)-2-deoxy-beta-D-galactopyra nosyl]oxy]-14,14-bis[[3-[[3-[[5-[[2-(acetylamino)-2-deoxy-b eta-D-galactopyranosyl]oxy]-1-oxopentyl]amino]propyl]amino] -3-oxopropoxy]methyl]-1,12,19,25-tetraoxo-16-oxa-13,20,24-t riazanonacos-1-yl]-4-hydroxy-2-pyrrolidinyl)methyl ester
ttactaaagcagtgttttcaa

SEQ ID NO: 219 - RNA, 21 nt, synthetic construct
  source 1..21: mol_type = other RNA
  modified_base 1: mod_base = OTHER; note = 2'-deoxy-2'-fluorocytidine-3'-phosphorothioate
  modified_base 2: mod_base = OTHER; note = 2'-O-methyluridine-3'-phosphorothioate
  modified_base 3: mod_base = OTHER; note = 2'-deoxy-2'-fluoroadenosine-3'-phosphate
  modified_base 4: mod_base = OTHER; note = 2'-O-methyladenosine-3'-phosphate
  modified_base 5: mod_base = OTHER; note = 2'-deoxy-2'-fluoroadenosine-3'-phosphate
  modified_base 6: mod_base = OTHER; note = 2'-O-methylguanosine-3'-phosphate
  modified_base 7: mod_base = OTHER; note = 2'-deoxy-2'-fluorocytidine-3'-phosphate
  modified_base 8: mod_base = OTHER; note = 2'-O-methyladenosine-3'-phosphate
  modified_base 9: mod_base = OTHER; note = 2'-deoxy-2'-fluoroguanosine-3'-phosphate
  modified_base 10: mod_base = OTHER; note = 2'-deoxy-2'-fluorouridine-3'-phosphate
  modified_base 11: mod_base = OTHER; note = 2'-deoxy-2'-fluoroguanosine-3'-phosphate
  modified_base 12: mod_base = OTHER; note = 2'-O-methyluridine-3'-phosphate
  modified_base 13: mod_base = OTHER; note = 2'-deoxy-2'-fluorouridine-3'-phosphate
  modified_base 14: mod_base = OTHER; note = 2'-O-methyluridine-3'-phosphate
  modified_base 15: mod_base = OTHER; note = 2'-deoxy-2'-fluorouridine-3'-phosphate
  modified_base 16: mod_base = OTHER; note = 2'-O-methylcytidine-3'-phosphate
  modified_base 17: mod_base = OTHER; note = 2'-deoxy-2'-fluoroadenosine-3'-phosphate
  modified_base 18: mod_base = OTHER; note = 2'-O-methylcytidine-3'-phosphate
  modified_base 19: mod_base = OTHER; note = 2'-deoxy-2'-fluorocytidine-3'-phosphate
  modified_base 20: mod_base = OTHER; note = 2'-O-methyluridine-3'-phosphate
  modified_base 21: mod_base = OTHER; note = 2'-deoxy-2'-fluoroadenosine-3'-phosphate ((2S,4R)-1-[29-[[2-(acetylamino)-2-deoxy-beta-D-galactopyra nosyl]oxy]-14,14-bis[[3-[[3-[[5-[[2-(acetylamino)-2-deoxy-b eta-D-galactopyranosyl]oxy]-1-oxopentyl]amino]propyl]amino] -3-oxopropoxy]methyl]-1,12,19,25-tetraoxo-16-oxa-13,20,24-t riazanonacos-1-yl]-4-hydroxy-2-pyrrolidinyl)methyl ester
ctaaagcagtgttttcaccta

SEQ ID NO: 220 - RNA, 21 nt, synthetic construct
  source 1..21: mol_type = other RNA
  modified_base 1: mod_base = OTHER; note = 2'-O-methylcytidine-3'-phosphorothioate
  modified_base 2: mod_base = OTHER; note = 2'-O-methyluridine-3'-phosphorothioate
  modified_base 3: mod_base = OTHER; note = 2'-O-methyladenosine-3'-phosphate
  modified_base 4: mod_base = OTHER; note = 2'-O-methyladenosine-3'-phosphate
  modified_base 5: mod_base = OTHER; note = 2'-O-methyladenosine-3'-phosphate
  modified_base 6: mod_base = OTHER; note = 2'-O-methylguanosine-3'-phosphate
  modified_base 7: mod_base = OTHER; note = 2'-deoxy-2'-fluorocytidine-3'-phosphate
  modified_base 8: mod_base = OTHER; note = 2'-O-methyladenosine-3'-phosphate
  modified_base 9: mod_base = OTHER; note = 2'-deoxy-2'-fluoroguanosine-3'-phosphate
  modified_base 10: mod_base = OTHER; note = 2'-deoxy-2'-fluorouridine-3'-phosphate
  modified_base 11: mod_base = OTHER; note = 2'-deoxy-2'-fluoroguanosine-3'-phosphate
  modified_base 12: mod_base = OTHER; note = 2'-O-methyluridine-3'-phosphate
  modified_base 13: mod_base = OTHER; note = 2'-O-methyluridine-3'-phosphate
  modified_base 14: mod_base = OTHER; note = 2'-O-methyluridine-3'-phosphate
  modified_base 15: mod_base = OTHER; note = 2'-O-methyluridine-3'-phosphate
  modified_base 16: mod_base = OTHER; note = 2'-O-methylcytidine-3'-phosphate
  modified_base 17: mod_base = OTHER; note = 2'-O-methyladenosine-3'-phosphate
  modified_base 18: mod_base = OTHER; note = 2'-O-methylcytidine-3'-phosphate
  modified_base 19: mod_base = OTHER; note = 2'-O-methylcytidine-3'-phosphate
  modified_base 20: mod_base = OTHER; note = 2'-O-methyluridine-3'-phosphate
  modified_base 21: mod_base = OTHER; note = 2'-O-methyladenosine-3'-phosphate ((2S,4R)-1-[29-[[2-(acetylamino)-2-deoxy-beta-D-galactopyra nosyl]oxy]-14,14-bis[[3-[[3-[[5-[[2-(acetylamino)-2-deoxy-b eta-D-galactopyranosyl]oxy]-1-oxopentyl]amino]propyl]amino] -3-oxopropoxy]methyl]-1,12,19,25-tetraoxo-16-oxa-13,20,24-t riazanonacos-1-yl]-4-hydroxy-2-pyrrolidinyl)methyl ester
ctaaagcagtgttttcaccta

SEQ ID NO: 221 - RNA, 21 nt, synthetic construct
  source 1..21: mol_type = other RNA
  modified_base 1: mod_base = OTHER; note = 2'-O-methylcytidine-3'-phosphorothioate
  modified_base 2: mod_base = OTHER; note = 2'-O-methyluridine-3'-phosphorothioate
  modified_base 3: mod_base = OTHER; note = 2'-O-methyladenosine-3'-phosphate
  modified_base 4: mod_base = OTHER; note = 2'-O-methyladenosine-3'-phosphate
  modified_base 5: mod_base = OTHER; note = 2'-O-methyladenosine-3'-phosphate
  modified_base 6: mod_base = OTHER; note = 2'-O-methylguanosine-3'-phosphate
  modified_base 7: mod_base = OTHER; note = 2'-deoxy-2'-fluorocytidine-3'-phosphate
  modified_base 8: mod_base = OTHER; note = 2'-O-methyladenosine-3'-phosphate
  modified_base 9: mod_base = OTHER; note = 2'-deoxy-2'-fluoroguanosine-3'-phosphate
  modified_base 10: mod_base = OTHER; note = 2'-deoxy-2'-fluorouridine-3'-phosphate
  modified_base 11: mod_base = OTHER; note = 2'-deoxy-2'-fluoroguanosine-3'-phosphate
  modified_base 12: mod_base = OTHER; note = 2'-O-methyluridine-3'-phosphate
  modified_base 13: mod_base = OTHER; note = 2'-O-methyluridine-3'-phosphate
  modified_base 14: mod_base = OTHER; note = 2'-O-methyluridine-3'-phosphate
  modified_base 15: mod_base = OTHER; note = 2'-O-methyluridine-3'-phosphate
  modified_base 16: mod_base = OTHER; note = 2'-O-methylcytidine-3'-phosphate
  modified_base 17: mod_base = OTHER; note = 2'-O-methyladenosine-3'-phosphate
  modified_base 18: mod_base = OTHER; note = 2'-O-methylcytidine-3'-phosphate
  modified_base 19: mod_base = OTHER; note = 2'-O-methylcytidine-3'-phosphate
  modified_base 20: mod_base = OTHER; note = 2'-O-methyluridine-3'-phosphate
  modified_base 21: mod_base = OTHER; note = 2'-O-methyladenosine-3'-phosphate ((2S,4R)-1-[29-[[2-(acetylamino)-2-deoxy-beta-D-galactopyra nosyl]oxy]-14,14-bis[[3-[[3-[[5-[[2-(acetylamino)-2-deoxy-b eta-D-galactopyranosyl]oxy]-1-oxopentyl]amino]propyl]amino] -3-oxopropoxy]methyl]-1,12,19,25-tetraoxo-16-oxa-13,20,24-t riazanonacos-1-yl]-4-hydroxy-2-pyrrolidinyl)methyl ester
ctaaagcagtgttttcaccta

SEQ ID NO: 222 - RNA, 21 nt, synthetic construct
  source 1..21: mol_type = other RNA
  modified_base 1: mod_base = OTHER; note = 2'-O-methylguanosine-3'-phosphorothioate
  modified_base 2: mod_base = OTHER; note = 2'-O-methylguanosine-3'-phosphorothioate
  modified_base 3: mod_base = OTHER; note = 2'-O-methylcytidine-3'-phosphate
  modified_base 4: mod_base = OTHER; note = 2'-O-methyladenosine-3'-phosphate
  modified_base 5: mod_base = OTHER; note = 2'-O-methylguanosine-3'-phosphate
  modified_base 6: mod_base = OTHER; note = 2'-O-methyladenosine-3'-phosphate
  modified_base 7: mod_base = OTHER; note = 2'-deoxy-2'-fluoroguanosine-3'-phosphate
  modified_base 8: mod_base = OTHER; note = 2'-O-methyladenosine-3'-phosphate
  modified_base 9: mod_base = OTHER; note = 2'-deoxy-2'-fluorocytidine-3'-phosphate
  modified_base 10: mod_base = OTHER; note = 2'-deoxy-2'-fluoroadenosine-3'-phosphate
  modified_base 11: mod_base = OTHER; note = 2'-deoxy-2'-fluoroadenosine-3'-phosphate
  modified_base 12: mod_base = OTHER; note = 2'-O-methyluridine-3'-phosphate
  modified_base 13: mod_base = OTHER; note = 2'-O-methyladenosine-3'-phosphate
  modified_base 14: mod_base = OTHER; note = 2'-O-methyladenosine-3'-phosphate
  modified_base 15: mod_base = OTHER; note = 2'-O-methyladenosine-3'-phosphate
  modified_base 16: mod_base = OTHER; note = 2'-O-methyladenosine-3'-phosphate
  modified_base 17: mod_base = OTHER; note = 2'-O-methylcytidine-3'-phosphate
  modified_base 18: mod_base = OTHER; note = 2'-O-methyladenosine-3'-phosphate
  modified_base 19: mod_base = OTHER; note = 2'-O-methyluridine-3'-phosphate
  modified_base 20: mod_base = OTHER; note = 2'-O-methyluridine-3'-phosphate
  modified_base 21: mod_base = OTHER; note = 2'-O-methyladenosine-3'-phosphate ((2S,4R)-1-[29-[[2-(acetylamino)-2-deoxy-beta-D-galactopyra nosyl]oxy]-14,14-bis[[3-[[3-[[5-[[2-(acetylamino)-2-deoxy-b eta-D-galactopyranosyl]oxy]-1-oxopentyl]amino]propyl]amino] -3-oxopropoxy]methyl]-1,12,19,25-tetraoxo-16-oxa-13,20,24-t riazanonacos-1-yl]-4-hydroxy-2-pyrrolidinyl)methyl ester
ggcagagacaataaaacatta

SEQ ID NO: 223 - RNA, 21 nt, synthetic construct
  source 1..21: mol_type = other RNA
  modified_base 1: mod_base = OTHER; note = 2'-O-methylguanosine-3'-phosphorothioate
  modified_base 2: mod_base = OTHER; note = 2'-O-methylguanosine-3'-phosphorothioate
  modified_base 3: mod_base = OTHER; note = 2'-O-methylcytidine-3'-phosphate
  modified_base 4: mod_base = OTHER; note = 2'-O-methyladenosine-3'-phosphate
  modified_base 5: mod_base = OTHER; note = 2'-O-methylguanosine-3'-phosphate
  modified_base 6: mod_base = OTHER; note = 2'-O-methyladenosine-3'-phosphate
  modified_base 7: mod_base = OTHER; note = 2'-deoxy-2'-fluoroguanosine-3'-phosphate
  modified_base 8: mod_base = OTHER; note = 2'-O-methyladenosine-3'-phosphate
  modified_base 9: mod_base = OTHER; note = 2'-deoxy-2'-fluorocytidine-3'-phosphate
  modified_base 10: mod_base = OTHER; note = 2'-deoxy-2'-fluoroadenosine-3'-phosphate
  modified_base 11: mod_base = OTHER; note = 2'-deoxy-2'-fluoroadenosine-3'-phosphate
  modified_base 12: mod_base = OTHER; note = 2'-O-methyluridine-3'-phosphate
  modified_base 13: mod_base = OTHER; note = 2'-O-methyladenosine-3'-phosphate
  modified_base 14: mod_base = OTHER; note = 2'-O-methyladenosine-3'-phosphate
  modified_base 15: mod_base = OTHER; note = 2'-O-methyladenosine-3'-phosphate
  modified_base 16: mod_base = OTHER; note = 2'-O-methyladenosine-3'-phosphate
  modified_base 17: mod_base = OTHER; note = 2'-O-methylcytidine-3'-phosphate
  modified_base 18: mod_base = OTHER; note = 2'-O-methyladenosine-3'-phosphate
  modified_base 19: mod_base = OTHER; note = 2'-O-methyluridine-3'-phosphate
  modified_base 20: mod_base = OTHER; note = 2'-O-methyluridine-3'-phosphate
  modified_base 21: mod_base = OTHER; note = 2'-O-methyladenosine-3'-phosphate ((2S,4R)-1-[29-[[2-(acetylamino)-2-deoxy-beta-D-galactopyra nosyl]oxy]-14,14-bis[[3-[[3-[[5-[[2-(acetylamino)-2-deoxy-b eta-D-galactopyranosyl]oxy]-1-oxopentyl]amino]propyl]amino] -3-oxopropoxy]methyl]-1,12,19,25-tetraoxo-16-oxa-13,20,24-t riazanonacos-1-yl]-4-hydroxy-2-pyrrolidinyl)methyl ester
ggcagagacaataaaacatta

SEQ ID NO: 224 - RNA, 21 nt, synthetic construct
  source 1..21: mol_type = other RNA
  modified_base 1: mod_base = OTHER; note = 2'-deoxy-2'-fluoroguanosine-3'-phosphorothioate
  modified_base 2: mod_base = OTHER; note = 2'-O-methylguanosine-3'-phosphorothioate
  modified_base 3: mod_base = OTHER; note = 2'-deoxy-2'-fluorocytidine-3'-phosphate
  modified_base 4: mod_base = OTHER; note = 2'-O-methyladenosine-3'-phosphate
  modified_base 5: mod_base = OTHER; note = 2'-deoxy-2'-fluoroguanosine-3'-phosphate
  modified_base 6: mod_base = OTHER; note = 2'-O-methyladenosine-3'-phosphate
  modified_base 7: mod_base = OTHER; note = 2'-deoxy-2'-fluoroguanosine-3'-phosphate
  modified_base 8: mod_base = OTHER; note = 2'-O-methyladenosine-3'-phosphate
  modified_base 9: mod_base = OTHER; note = 2'-deoxy-2'-fluorocytidine-3'-phosphate
  modified_base 10: mod_base = OTHER; note = 2'-deoxy-2'-fluoroadenosine-3'-phosphate
  modified_base 11: mod_base = OTHER; note = 2'-deoxy-2'-fluoroadenosine-3'-phosphate
  modified_base 12: mod_base = OTHER; note = 2'-O-methyluridine-3'-phosphate
  modified_base 13: mod_base = OTHER; note = 2'-deoxy-2'-fluoroadenosine-3'-phosphate
  modified_base 14: mod_base = OTHER; note = 2'-O-methyladenosine-3'-phosphate
  modified_base 15: mod_base = OTHER; note = 2'-deoxy-2'-fluoroadenosine-3'-phosphate
  modified_base 16: mod_base = OTHER; note = 2'-O-methyladenosine-3'-phosphate
  modified_base 17: mod_base = OTHER; note = 2'-deoxy-2'-fluorocytidine-3'-phosphate
  modified_base 18: mod_base = OTHER; note = 2'-O-methyladenosine-3'-phosphate
  modified_base 19: mod_base = OTHER; note = 2'-deoxy-2'-fluorouridine-3'-phosphate
  modified_base 20: mod_base = OTHER; note = 2'-O-methyluridine-3'-phosphate
  modified_base 21: mod_base = OTHER; note = 2'-deoxy-2'-fluoroadenosine-3'-phosphate ((2S,4R)-1-[29-[[2-(acetylamino)-2-deoxy-beta-D-galactopyra nosyl]oxy]-14,14-bis[[3-[[3-[[5-[[2-(acetylamino)-2-deoxy-b eta-D-galactopyranosyl]oxy]-1-oxopentyl]amino]propyl]amino] -3-oxopropoxy]methyl]-1,12,19,25-tetraoxo-16-oxa-13,20,24-t riazanonacos-1-yl]-4-hydroxy-2-pyrrolidinyl)methyl ester
ggcagagacaataaaacatta

SEQ ID NO: 225 - RNA, 21 nt, synthetic construct
  source 1..21: mol_type = other RNA
  modified_base 1: mod_base = OTHER; note = 2'-deoxy-2'-fluorocytidine-3'-phosphorothioate
  modified_base 2: mod_base = OTHER; note = 2'-O-methyladenosine-3'-phosphorothioate
  modified_base 3: mod_base = OTHER; note = 2'-deoxy-2'-fluoroguanosine-3'-phosphate
  modified_base 4: mod_base = OTHER; note = 2'-O-methyladenosine-3'-phosphate
  modified_base 5: mod_base = OTHER; note = 2'-deoxy-2'-fluoroguanosine-3'-phosphate
  modified_base 6: mod_base = OTHER; note = 2'-O-methyladenosine-3'-phosphate
  modified_base 7: mod_base = OTHER; note = 2'-deoxy-2'-fluorocytidine-3'-phosphate
  modified_base 8: mod_base = OTHER; note = 2'-O-methyladenosine-3'-phosphate
  modified_base 9: mod_base = OTHER; note = 2'-deoxy-2'-fluoroadenosine-3'-phosphate
  modified_base 10: mod_base = OTHER; note = 2'-deoxy-2'-fluorouridine-3'-phosphate
  modified_base 11: mod_base = OTHER; note = 2'-deoxy-2'-fluoroadenosine-3'-phosphate
  modified_base 12: mod_base = OTHER; note = 2'-O-methyladenosine-3'-phosphate
  modified_base 13: mod_base = OTHER; note = 2'-deoxy-2'-fluoroadenosine-3'-phosphate
  modified_base 14: mod_base = OTHER; note = 2'-O-methyladenosine-3'-phosphate
  modified_base 15: mod_base = OTHER; note = 2'-deoxy-2'-fluorocytidine-3'-phosphate
  modified_base 16: mod_base = OTHER; note = 2'-O-methyladenosine-3'-phosphate
  modified_base 17: mod_base = OTHER; note = 2'-deoxy-2'-fluorouridine-3'-phosphate
  modified_base 18: mod_base = OTHER; note = 2'-O-methyluridine-3'-phosphate
  modified_base 19: mod_base = OTHER; note = 2'-deoxy-2'-fluorocytidine-3'-phosphate
  modified_base 20: mod_base = OTHER; note = 2'-O-methylcytidine-3'-phosphate
  modified_base 21: mod_base = OTHER; note = 2'-deoxy-2'-fluorouridine-3'-phosphate ((2S,4R)-1-[29-[[2-(acetylamino)-2-deoxy-beta-D-galactopyra nosyl]oxy]-14,14-bis[[3-[[3-[[5-[[2-(acetylamino)-2-deoxy-b eta-D-galactopyranosyl]oxy]-1-oxopentyl]amino]propyl]amino] -3-oxopropoxy]methyl]-1,12,19,25-tetraoxo-16-oxa-13,20,24-t riazanonacos-1-yl]-4-hydroxy-2-pyrrolidinyl)methyl ester
cagagacaataaaacattcct

SEQ ID NO: 226 - RNA, 21 nt, synthetic construct
  source 1..21: mol_type = other RNA
  modified_base 1: mod_base = OTHER; note = 2'-O-methylcytidine-3'-phosphorothioate
  modified_base 2: mod_base = OTHER; note = 2'-O-methyladenosine-3'-phosphorothioate
  modified_base 3: mod_base = OTHER; note = 2'-O-methylguanosine-3'-phosphate
  modified_base 4: mod_base = OTHER; note = 2'-O-methyladenosine-3'-phosphate
  modified_base 5: mod_base = OTHER; note = 2'-O-methylguanosine-3'-phosphate
  modified_base 6: mod_base = OTHER; note = 2'-O-methyladenosine-3'-phosphate
  modified_base 7: mod_base = OTHER; note = 2'-deoxy-2'-fluorocytidine-3'-phosphate
  modified_base 8: mod_base = OTHER; note = 2'-O-methyladenosine-3'-phosphate
  modified_base 9: mod_base = OTHER; note = 2'-deoxy-2'-fluoroadenosine-3'-phosphate
  modified_base 10: mod_base = OTHER; note = 2'-deoxy-2'-fluorouridine-3'-phosphate
  modified_base 11: mod_base = OTHER; note = 2'-deoxy-2'-fluoroadenosine-3'-phosphate
  modified_base 12: mod_base = OTHER; note = 2'-O-methyladenosine-3'-phosphate
  modified_base 13: mod_base = OTHER; note = 2'-O-methyladenosine-3'-phosphate
  modified_base 14: mod_base = OTHER; note = 2'-O-methyladenosine-3'-phosphate
  modified_base 15: mod_base = OTHER; note = 2'-O-methylcytidine-3'-phosphate
  modified_base 16: mod_base = OTHER; note = 2'-O-methyladenosine-3'-phosphate
  modified_base 17: mod_base = OTHER; note = 2'-O-methyluridine-3'-phosphate
  modified_base 18: mod_base = OTHER; note = 2'-O-methyluridine-3'-phosphate
  modified_base 19: mod_base = OTHER; note = 2'-O-methylcytidine-3'-phosphate
  modified_base 20: mod_base = OTHER; note = 2'-O-methylcytidine-3'-phosphate
  modified_base 21: mod_base = OTHER; note = 2'-O-methyluridine-3'-phosphate ((2S,4R)-1-[29-[[2-(acetylamino)-2-deoxy-beta-D-galactopyra nosyl]oxy]-14,14-bis[[3-[[3-[[5-[[2-(acetylamino)-2-deoxy-b eta-D-galactopyranosyl]oxy]-1-oxopentyl]amino]propyl]amino] -3-oxopropoxy]methyl]-1,12,19,25-tetraoxo-16-oxa-13,20,24-t riazanonacos-1-yl]-4-hydroxy-2-pyrrolidinyl)methyl ester
cagagacaataaaacattcct

SEQ ID NO: 227 - RNA, 21 nt, synthetic construct
  source 1..21: mol_type = other RNA
  modified_base 1: mod_base = OTHER; note = 2'-O-methylcytidine-3'-phosphorothioate
  modified_base 2: mod_base = OTHER; note = 2'-O-methyladenosine-3'-phosphorothioate
  modified_base 3: mod_base = OTHER; note = 2'-O-methylguanosine-3'-phosphate
  modified_base 4: mod_base = OTHER; note = 2'-O-methyladenosine-3'-phosphate
  modified_base 5: mod_base = OTHER; note = 2'-O-methylguanosine-3'-phosphate
  modified_base 6: mod_base = OTHER; note = 2'-O-methyladenosine-3'-phosphate
  modified_base 7: mod_base = OTHER; note = 2'-deoxy-2'-fluorocytidine-3'-phosphate
  modified_base 8: mod_base = OTHER; note = 2'-O-methyladenosine-3'-phosphate
  modified_base 9: mod_base = OTHER; note = 2'-deoxy-2'-fluoroadenosine-3'-phosphate
  modified_base 10: mod_base = OTHER; note = 2'-deoxy-2'-fluorouridine-3'-phosphate
  modified_base 11: mod_base = OTHER; note = 2'-deoxy-2'-fluoroadenosine-3'-phosphate
  modified_base 12: mod_base = OTHER; note = 2'-O-methyladenosine-3'-phosphate
  modified_base 13: mod_base = OTHER; note = 2'-O-methyladenosine-3'-phosphate
  modified_base 14: mod_base = OTHER; note = 2'-O-methyladenosine-3'-phosphate
  modified_base 15: mod_base = OTHER; note = 2'-O-methylcytidine-3'-phosphate
  modified_base 16: mod_base = OTHER; note = 2'-O-methyladenosine-3'-phosphate
  modified_base 17: mod_base = OTHER; note = 2'-O-methyluridine-3'-phosphate
  modified_base 18: mod_base = OTHER; note = 2'-O-methyluridine-3'-phosphate
  modified_base 19: mod_base = OTHER; note = 2'-O-methylcytidine-3'-phosphate
  modified_base 20: mod_base = OTHER; note = 2'-O-methylcytidine-3'-phosphate
  modified_base 21: mod_base = OTHER; note = 2'-O-methyluridine-3'-phosphate ((2S,4R)-1-[29-[[2-(acetylamino)-2-deoxy-beta-D-galactopyra nosyl]oxy]-14,14-bis[[3-[[3-[[5-[[2-(acetylamino)-2-deoxy-b eta-D-galactopyranosyl]oxy]-1-oxopentyl]amino]propyl]amino] -3-oxopropoxy]methyl]-1,12,19,25-tetraoxo-16-oxa-13,20,24-t riazanonacos-1-yl]-4-hydroxy-2-pyrrolidinyl)methyl ester
cagagacaataaaacattcct

SEQ ID NO: 228 - RNA, 21 nt, synthetic construct
  source 1..21: mol_type = other RNA
  modified_base 1: mod_base = OTHER; note = 2'-O-methylcytidine-3'-phosphorothioate
  modified_base 2: mod_base = OTHER; note = 2'-O-methyladenosine-3'-phosphorothioate
  modified_base 3: mod_base = OTHER; note = 2'-O-methyladenosine-3'-phosphate
  modified_base 4: mod_base = OTHER; note = 2'-O-methyluridine-3'-phosphate
  modified_base 5: mod_base = OTHER; note = 2'-O-methyladenosine-3'-phosphate
  modified_base 6: mod_base = OTHER; note = 2'-O-methyladenosine-3'-phosphate
  modified_base 7: mod_base = OTHER; note = 2'-deoxy-2'-fluoroadenosine-3'-phosphate
  modified_base 8: mod_base = OTHER; note = 2'-O-methyladenosine-3'-phosphate
  modified_base 9: mod_base = OTHER; note = 2'-deoxy-2'-fluorocytidine-3'-phosphate
  modified_base 10: mod_base = OTHER; note = 2'-deoxy-2'-fluoroadenosine-3'-phosphate
  modified_base 11: mod_base = OTHER; note = 2'-deoxy-2'-fluorouridine-3'-phosphate
  modified_base 12: mod_base = OTHER; note = 2'-O-methyluridine-3'-phosphate
  modified_base 13: mod_base = OTHER; note = 2'-O-methylcytidine-3'-phosphate
  modified_base 14: mod_base = OTHER; note = 2'-O-methylcytidine-3'-phosphate
  modified_base 15: mod_base = OTHER; note = 2'-O-methyluridine-3'-phosphate
  modified_base 16: mod_base = OTHER; note = 2'-O-methylguanosine-3'-phosphate
  modified_base 17: mod_base = OTHER; note = 2'-O-methyluridine-3'-phosphate
  modified_base 18: mod_base = OTHER; note = 2'-O-methylguanosine-3'-phosphate
  modified_base 19: mod_base = OTHER; note = 2'-O-methyladenosine-3'-phosphate
  modified_base 20: mod_base = OTHER; note = 2'-O-methyladenosine-3'-phosphate
  modified_base 21: mod_base = OTHER; note = 2'-O-methyladenosine-3'-phosphate ((2S,4R)-1-[29-[[2-(acetylamino)-2-deoxy-beta-D-galactopyra nosyl]oxy]-14,14-bis[[3-[[3-[[5-[[2-(acetylamino)-2-deoxy-b eta-D-galactopyranosyl]oxy]-1-oxopentyl]amino]propyl]amino] -3-oxopropoxy]methyl]-1,12,19,25-tetraoxo-16-oxa-13,20,24-t riazanonacos-1-yl]-4-hydroxy-2-pyrrolidinyl)methyl ester
caataaaacattcctgtgaaa

SEQ ID NO: 229 - RNA, 21 nt, synthetic construct
  source 1..21: mol_type = other RNA
  modified_base 1: mod_base = OTHER; note = 2'-O-methylcytidine-3'-phosphorothioate
  modified_base 2: mod_base = OTHER; note = 2'-O-methyladenosine-3'-phosphorothioate
  modified_base 3: mod_base = OTHER; note = 2'-O-methyladenosine-3'-phosphate
  modified_base 4: mod_base = OTHER; note = 2'-O-methyluridine-3'-phosphate
  modified_base 5: mod_base = OTHER; note = 2'-O-methyladenosine-3'-phosphate
  modified_base 6: mod_base = OTHER; note = 2'-O-methyladenosine-3'-phosphate
  modified_base 7: mod_base = OTHER; note = 2'-deoxy-2'-fluoroadenosine-3'-phosphate
  modified_base 8: mod_base = OTHER; note = 2'-O-methyladenosine-3'-phosphate
  modified_base 9: mod_base = OTHER; note = 2'-deoxy-2'-fluorocytidine-3'-phosphate
  modified_base 10: mod_base = OTHER; note = 2'-deoxy-2'-fluoroadenosine-3'-phosphate
  modified_base 11: mod_base = OTHER; note = 2'-deoxy-2'-fluorouridine-3'-phosphate
  modified_base 12: mod_base = OTHER; note = 2'-O-methyluridine-3'-phosphate
  modified_base 13: mod_base = OTHER; note = 2'-O-methylcytidine-3'-phosphate
  modified_base 14: mod_base = OTHER; note = 2'-O-methylcytidine-3'-phosphate
  modified_base 15: mod_base = OTHER; note = 2'-O-methyluridine-3'-phosphate
  modified_base 16: mod_base = OTHER; note = 2'-O-methylguanosine-3'-phosphate
  modified_base 17: mod_base = OTHER; note = 2'-O-methyluridine-3'-phosphate
  modified_base 18: mod_base = OTHER; note = 2'-O-methylguanosine-3'-phosphate
  modified_base 19: mod_base = OTHER; note = 2'-O-methyladenosine-3'-phosphate
  modified_base 20: mod_base = OTHER; note = 2'-O-methyladenosine-3'-phosphate
  modified_base 21: mod_base = OTHER; note = 2'-O-methyladenosine-3'-phosphate ((2S,4R)-1-[29-[[2-(acetylamino)-2-deoxy-beta-D-galactopyra nosyl]oxy]-14,14-bis[[3-[[3-[[5-[[2-(acetylamino)-2-deoxy-b eta-D-galactopyranosyl]oxy]-1-oxopentyl]amino]propyl]amino] -3-oxopropoxy]methyl]-1,12,19,25-tetraoxo-16-oxa-13,20,24-t riazanonacos-1-yl]-4-hydroxy-2-pyrrolidinyl)methyl ester
caataaaacattcctgtgaaa

SEQ ID NO: 230 - RNA, 21 nt, synthetic construct
  source 1..21: mol_type = other RNA
  modified_base 1: mod_base = OTHER; note = 2'-deoxy-2'-fluorocytidine-3'-phosphorothioate
  modified_base 2: mod_base = OTHER; note = 2'-O-methyladenosine-3'-phosphorothioate
  modified_base 3: mod_base = OTHER; note = 2'-deoxy-2'-fluoroadenosine-3'-phosphate
  modified_base 4: mod_base = OTHER; note = 2'-O-methyluridine-3'-phosphate
  modified_base 5: mod_base = OTHER; note = 2'-deoxy-2'-fluoroadenosine-3'-phosphate
  modified_base 6: mod_base = OTHER; note = 2'-O-methyladenosine-3'-phosphate
  modified_base 7: mod_base = OTHER; note = 2'-deoxy-2'-fluoroadenosine-3'-phosphate
  modified_base 8: mod_base = OTHER; note = 2'-O-methyladenosine-3'-phosphate
  modified_base 9: mod_base = OTHER; note = 2'-deoxy-2'-fluorocytidine-3'-phosphate
  modified_base 10: mod_base = OTHER; note = 2'-deoxy-2'-fluoroadenosine-3'-phosphate
  modified_base 11: mod_base = OTHER; note = 2'-deoxy-2'-fluorouridine-3'-phosphate
  modified_base 12: mod_base = OTHER; note = 2'-O-methyluridine-3'-phosphate
  modified_base 13: mod_base = OTHER; note = 2'-deoxy-2'-fluorocytidine-3'-phosphate
  modified_base 14: mod_base = OTHER; note = 2'-O-methylcytidine-3'-phosphate
  modified_base 15: mod_base = OTHER; note = 2'-deoxy-2'-fluorouridine-3'-phosphate
  modified_base 16: mod_base = OTHER; note = 2'-O-methylguanosine-3'-phosphate
  modified_base 17: mod_base = OTHER; note = 2'-deoxy-2'-fluorouridine-3'-phosphate
  modified_base 18: mod_base = OTHER; note = 2'-O-methylguanosine-3'-phosphate
  modified_base 19: mod_base = OTHER; note = 2'-deoxy-2'-fluoroadenosine-3'-phosphate
  modified_base 20: mod_base = OTHER; note = 2'-O-methyladenosine-3'-phosphate
  modified_base 21: mod_base = OTHER; note = 2'-deoxy-2'-fluoroadenosine-3'-phosphate ((2S,4R)-1-[29-[[2-(acetylamino)-2-deoxy-beta-D-galactopyra nosyl]oxy]-14,14-bis[[3-[[3-[[5-[[2-(acetylamino)-2-deoxy-b eta-D-galactopyranosyl]oxy]-1-oxopentyl]amino]propyl]amino] -3-oxopropoxy]methyl]-1,12,19,25-tetraoxo-16-oxa-13,20,24-t riazanonacos-1-yl]-4-hydroxy-2-pyrrolidinyl)methyl ester
caataaaacattcctgtgaaa

SEQ ID NO: 231 - RNA, 23 nt, synthetic construct
  source 1..23: mol_type = other RNA
  modified_base 1: mod_base = OTHER; note = 2'-O-methyluridine-3'-phosphorothioate
  modified_base 2: mod_base = OTHER; note = 2'-deoxy-2'-fluorouridine-3'-phosphorothioate
  modified_base 3: mod_base = OTHER; note = 2'-O-methyluridine-3'-phosphate
  modified_base 4: mod_base = OTHER; note = 2'-O-methylguanosine-3'-phosphate
  modified_base 5: mod_base = OTHER; note = 2'-O-methylguanosine-3'-phosphate
  modified_base 6: mod_base = OTHER; note = 2'-deoxy-2'-fluorouridine-3'-phosphate
  modified_base 7: mod_base = OTHER; note = 2'-O-methyluridine-3'-phosphate
  modified_base 8: mod_base = OTHER; note = 2'-deoxy-2'-fluoroadenosine-3'-phosphate
  modified_base 9: mod_base = OTHER; note = 2'-deoxy-2'-fluorocytidine-3'-phosphate
  modified_base 10: mod_base = OTHER; note = 2'-O-methyladenosine-3'-phosphate
  modified_base 11: mod_base = OTHER; note = 2'-O-methyluridine-3'-phosphate
  modified_base 12: mod_base = OTHER; note = 2'-O-methylguanosine-3'-phosphate
  modified_base 13: mod_base = OTHER; note = 2'-O-methyladenosine-3'-phosphate
  modified_base 14: mod_base = OTHER; note = 2'-deoxy-2'-fluoroadenosine-3'-phosphate
  modified_base 15: mod_base = OTHER; note = 2'-O-methyladenosine-3'-phosphate
  modified_base 16: mod_base = OTHER; note = 2'-deoxy-2'-fluorouridine-3'-phosphate
  modified_base 17: mod_base = OTHER; note = 2'-O-methylcytidine-3'-phosphate
  modified_base 18: mod_base = OTHER; note = 2'-O-methylcytidine-3'-phosphate
  modified_base 19: mod_base = OTHER; note = 2'-O-methylcytidine-3'-phosphate
  modified_base 20: mod_base = OTHER; note = 2'-O-methyladenosine-3'-phosphate
  modified_base 21: mod_base = OTHER; note = 2'-O-methyluridine-3'-phosphorothioate
  modified_base 22: mod_base = OTHER; note = 2'-O-methylcytidine-3'-phosphorothioate
  modified_base 23: mod_base = OTHER; note = 2'-O-methylcytidine
tttggttacatgaaatcccatcc

SEQ ID NO: 232 - RNA, 23 nt, synthetic construct
  source 1..23: mol_type = other RNA
  modified_base 1: mod_base = OTHER; note = 2'-O-methyluridine-3'-phosphorothioate
  modified_base 2: mod_base = OTHER; note = 2'-deoxy-2'-fluorouridine-3'-phosphorothioate
  modified_base 3: mod_base = OTHER; note = 2'-O-methyluridine-3'-phosphate
  modified_base 4: mod_base = OTHER; note = 2'-deoxy-2'-fluoroguanosine-3'-phosphate
  modified_base 5: mod_base = OTHER; note = 2'-O-methylguanosine-3'-phosphate
  modified_base 6: mod_base = OTHER; note = 2'-deoxy-2'-fluorouridine-3'-phosphate
  modified_base 7: mod_base = OTHER; note = 2'-O-methyluridine-3'-phosphate
  modified_base 8: mod_base = OTHER; note = 2'-deoxy-2'-fluoroadenosine-3'-phosphate
  modified_base 9: mod_base = OTHER; note = 2'-O-methylcytidine-3'-phosphate
  modified_base 10: mod_base = OTHER; note = 2'-deoxy-2'-fluoroadenosine-3'-phosphate
  modified_base 11: mod_base = OTHER; note = 2'-O-methyluridine-3'-phosphate
  modified_base 12: mod_base = OTHER; note = 2'-O-methylguanosine-3'-phosphate
  modified_base 13: mod_base = OTHER; note = 2'-O-methyladenosine-3'-phosphate
  modified_base 14: mod_base = OTHER; note = 2'-deoxy-2'-fluoroadenosine-3'-phosphate
  modified_base 15: mod_base = OTHER; note = 2'-O-methyladenosine-3'-phosphate
  modified_base 16: mod_base = OTHER; note = 2'-deoxy-2'-fluorouridine-3'-phosphate
  modified_base 17: mod_base = OTHER; note = 2'-O-methylcytidine-3'-phosphate
  modified_base 18: mod_base = OTHER; note = 2'-deoxy-2'-fluorocytidine-3'-phosphate
  modified_base 19: mod_base = OTHER; note = 2'-O-methylcytidine-3'-phosphate
  modified_base 20: mod_base = OTHER; note = 2'-deoxy-2'-fluoroadenosine-3'-phosphate
  modified_base 21: mod_base = OTHER; note = 2'-O-methyluridine-3'-phosphorothioate
  modified_base 22: mod_base = OTHER; note = 2'-O-methylcytidine-3'-phosphorothioate
  modified_base 23: mod_base = OTHER; note = 2'-O-methylcytidine
tttggttacatgaaatcccatcc

SEQ ID NO: 233 - RNA, 23 nt, synthetic construct
  source 1..23: mol_type = other RNA
  modified_base 1: mod_base = OTHER; note = 2'-O-methyluridine-3'-phosphorothioate
  modified_base 2: mod_base = OTHER; note = 2'-deoxy-2'-fluorouridine-3'-phosphorothioate
  modified_base 3: mod_base = OTHER; note = 2'-O-methyluridine-3'-phosphate
  modified_base 4: mod_base = OTHER; note = 2'-O-methylguanosine-3'-phosphate
  modified_base 5: mod_base = OTHER; note = 2'-O-methylguanosine-3'-phosphate
  modified_base 6: mod_base = OTHER; note = 2'-deoxy-2'-fluorouridine-3'-phosphate
  modified_base 7: mod_base = OTHER; note = 2'-O-methyluridine-3'-phosphate
  modified_base 8: mod_base = OTHER; note = 2'-O-methyladenosine-3'-phosphate
  modified_base 9: mod_base = OTHER; note = 2'-O-methylcytidine-3'-phosphate
  modified_base 10: mod_base = OTHER; note = 2'-O-methyladenosine-3'-phosphate
  modified_base 11: mod_base = OTHER; note = 2'-O-methyluridine-3'-phosphate
  modified_base 12: mod_base = OTHER; note = 2'-O-methylguanosine-3'-phosphate
  modified_base 13: mod_base = OTHER; note = 2'-O-methyladenosine-3'-phosphate
  modified_base 14: mod_base = OTHER; note = 2'-deoxy-2'-fluoroadenosine-3'-phosphate
  modified_base 15: mod_base = OTHER; note = 2'-O-methyladenosine-3'-phosphate
  modified_base 16: mod_base = OTHER; note = 2'-deoxy-2'-fluorouridine-3'-phosphate
  modified_base 17: mod_base = OTHER; note = 2'-O-methylcytidine-3'-phosphate
  modified_base 18: mod_base = OTHER; note = 2'-O-methylcytidine-3'-phosphate
  modified_base 19: mod_base = OTHER; note = 2'-O-methylcytidine-3'-phosphate
  modified_base 20: mod_base = OTHER; note = 2'-O-methyladenosine-3'-phosphate
  modified_base 21: mod_base = OTHER; note = 2'-O-methyluridine-3'-phosphorothioate
  modified_base 22: mod_base = OTHER; note = 2'-O-methylcytidine-3'-phosphorothioate
  modified_base 23: mod_base = OTHER; note = 2'-O-methylcytidine
tttggttacatgaaatcccatcc

SEQ ID NO: 234 - RNA, 23 nt, synthetic construct
  source 1..23: mol_type = other RNA
  modified_base 1: mod_base = OTHER; note = 2'-O-methyluridine-3'-phosphorothioate
  modified_base 2: mod_base = OTHER; note = 2'-deoxy-2'-fluorocytidine-3'-phosphorothioate
  modified_base 3: mod_base = OTHER; note = 2'-O-methyluridine-3'-phosphate
  modified_base 4: mod_base = OTHER; note = 2'-deoxy-2'-fluorouridine-3'-phosphate
  modified_base 5: mod_base = OTHER; note = 2'-O-methylguanosine-3'-phosphate
  modified_base 6: mod_base = OTHER; note = 2'-deoxy-2'-fluoroguanosine-3'-phosphate
  modified_base 7: mod_base = OTHER; note = 2'-O-methyluridine-3'-phosphate
  modified_base 8: mod_base = OTHER; note = 2'-deoxy-2'-fluorouridine-3'-phosphate
  modified_base 9: mod_base = OTHER; note = 2'-O-methyladenosine-3'-phosphate
  modified_base 10: mod_base = OTHER; note = 2'-deoxy-2'-fluorocytidine-3'-phosphate
  modified_base 11: mod_base = OTHER; note = 2'-O-methyladenosine-3'-phosphate
  modified_base 12: mod_base = OTHER; note = 2'-O-methyluridine-3'-phosphate
  modified_base 13: mod_base = OTHER; note = 2'-O-methylguanosine-3'-phosphate
  modified_base 14: mod_base = OTHER; note = 2'-deoxy-2'-fluoroadenosine-3'-phosphate
  modified_base 15: mod_base = OTHER; note = 2'-O-methyladenosine-3'-phosphate
  modified_base 16: mod_base = OTHER; note = 2'-deoxy-2'-fluoroadenosine-3'-phosphate
  modified_base 17: mod_base = OTHER; note = 2'-O-methyluridine-3'-phosphate
  modified_base 18: mod_base = OTHER; note = 2'-deoxy-2'-fluorocytidine-3'-phosphate
  modified_base 19: mod_base = OTHER; note = 2'-O-methylcytidine-3'-phosphate
  modified_base 20: mod_base = OTHER; note = 2'-deoxy-2'-fluorocytidine-3'-phosphate
  modified_base 21: mod_base = OTHER; note = 2'-O-methyladenosine-3'-phosphorothioate
  modified_base 22: mod_base = OTHER; note = 2'-O-methyluridine-3'-phosphorothioate
  modified_base 23: mod_base = OTHER; note = 2'-O-methylcytidine
tcttggttacatgaaatcccatc

SEQ ID NO: 235 - RNA, 23 nt, synthetic construct
  source 1..23: mol_type = other RNA
  modified_base 1: mod_base = OTHER; note = 2'-O-methyluridine-3'-phosphorothioate
  modified_base 2: mod_base = OTHER; note = 2'-deoxy-2'-fluorocytidine-3'-phosphorothioate
  modified_base 3: mod_base = OTHER; note = 2'-O-methyluridine-3'-phosphate
  modified_base 4: mod_base = OTHER; note = 2'-O-methyluridine-3'-phosphate
  modified_base 5: mod_base = OTHER; note = 2'-O-methylguanosine-3'-phosphate
  modified_base 6: mod_base = OTHER; note = 2'-deoxy-2'-fluoroguanosine-3'-phosphate
  modified_base 7: mod_base = OTHER; note = 2'-O-methyluridine-3'-phosphate
  modified_base 8: mod_base = OTHER; note = 2'-deoxy-2'-fluorouridine-3'-phosphate
  modified_base 9: mod_base = OTHER; note = 2'-deoxy-2'-fluoroadenosine-3'-phosphate
  modified_base 10: mod_base = OTHER; note = 2'-O-methylcytidine-3'-phosphate
  modified_base 11: mod_base = OTHER; note = 2'-O-methyladenosine-3'-phosphate
  modified_base 12: mod_base = OTHER; note = 2'-O-methyluridine-3'-phosphate
  modified_base 13: mod_base = OTHER; note = 2'-O-methylguanosine-3'-phosphate
  modified_base 14: mod_base = OTHER; note = 2'-deoxy-2'-fluoroadenosine-3'-phosphate
  modified_base 15: mod_base = OTHER; note = 2'-O-methyladenosine-3'-phosphate
  modified_base 16: mod_base = OTHER; note = 2'-deoxy-2'-fluoroadenosine-3'-phosphate
  modified_base 17: mod_base = OTHER; note = 2'-O-methyluridine-3'-phosphate
  modified_base 18: mod_base = OTHER; note = 2'-O-methylcytidine-3'-phosphate
  modified_base 19: mod_base = OTHER; note = 2'-O-methylcytidine-3'-phosphate
  modified_base 20: mod_base = OTHER; note = 2'-O-methylcytidine-3'-phosphate
  modified_base 21: mod_base = OTHER; note = 2'-O-methyladenosine-3'-phosphorothioate
  modified_base 22: mod_base = OTHER; note = 2'-O-methyluridine-3'-phosphorothioate
  modified_base 23: mod_base = OTHER; note = 2'-O-methylcytidine
tcttggttacatgaaatcccatc

SEQ ID NO: 236 - RNA, 23 nt, synthetic construct
  source 1..23: mol_type = other RNA
  modified_base 1: mod_base = OTHER; note = 2'-O-methyluridine-3'-phosphorothioate
  modified_base 2: mod_base = OTHER; note = 2'-deoxy-2'-fluorocytidine-3'-phosphorothioate
  modified_base 3: mod_base = OTHER; note = 2'-O-methyluridine-3'-phosphate
  modified_base 4: mod_base = OTHER; note = 2'-O-methyluridine-3'-phosphate
  modified_base 5: mod_base = OTHER; note = 2'-O-methylguanosine-3'-phosphate
  modified_base 6: mod_base = OTHER; note = 2'-deoxy-2'-fluoroguanosine-3'-phosphate
  modified_base 7: mod_base = OTHER; note = 2'-O-methyluridine-3'-phosphate
  modified_base 8: mod_base = OTHER; note = 2'-O-methyluridine-3'-phosphate
  modified_base 9: mod_base = OTHER; note = 2'-deoxy-2'-fluoroadenosine-3'-phosphate
  modified_base 10: mod_base = OTHER; note = 2'-O-methylcytidine-3'-phosphate
  modified_base 11: mod_base = OTHER; note = 2'-O-methyladenosine-3'-phosphate
  modified_base 12: mod_base = OTHER; note = 2'-O-methyluridine-3'-phosphate
  modified_base 13: mod_base = OTHER; note = 2'-O-methylguanosine-3'-phosphate
  modified_base 14: mod_base = OTHER; note = 2'-deoxy-2'-fluoroadenosine-3'-phosphate
  modified_base 15: mod_base = OTHER; note = 2'-O-methyladenosine-3'-phosphate
  modified_base 16: mod_base = OTHER; note = 2'-deoxy-2'-fluoroadenosine-3'-phosphate
  modified_base 17: mod_base = OTHER; note = 2'-O-methyluridine-3'-phosphate
  modified_base 18: mod_base = OTHER; note = 2'-O-methylcytidine-3'-phosphate
  modified_base 19: mod_base = OTHER; note = 2'-O-methylcytidine-3'-phosphate
  modified_base 20: mod_base = OTHER; note = 2'-O-methylcytidine-3'-phosphate
  modified_base 21: mod_base = OTHER; note = 2'-O-methyladenosine-3'-phosphorothioate
  modified_base 22: mod_base = OTHER; note = 2'-O-methyluridine-3'-phosphorothioate
  modified_base 23: mod_base = OTHER; note = 2'-O-methylcytidine
tcttggttacatgaaatcccatc

SEQ ID NO: 237 - RNA, 23 nt, synthetic construct
  source 1..23: mol_type = other RNA
  modified_base 1: mod_base = OTHER; note = 2'-O-methyluridine-3'-phosphorothioate
  modified_base 2: mod_base = OTHER; note = 2'-deoxy-2'-fluorocytidine-3'-phosphorothioate
  modified_base 3: mod_base = OTHER; note = 2'-O-methyluridine-3'-phosphate
  modified_base 4: mod_base = OTHER; note = 2'-O-methyluridine-3'-phosphate
  modified_base 5: mod_base = OTHER; note = 2'-O-methylguanosine-3'-phosphate
  modified_base 6: mod_base = OTHER; note = 2'-deoxy-2'-fluoroguanosine-3'-phosphate
  modified_base 7: mod_base = OTHER; note = 2'-O-methyluridine-3'-phosphate
  modified_base 8: mod_base = OTHER; note = 2'-O-methyluridine-3'-phosphate
  modified_base 9: mod_base = OTHER; note = 2'-O-methyladenosine-3'-phosphate
  modified_base 10: mod_base = OTHER; note = 2'-O-methylcytidine-3'-phosphate
  modified_base 11: mod_base = OTHER; note = 2'-O-methyladenosine-3'-phosphate
  modified_base 12: mod_base = OTHER; note = 2'-O-methyluridine-3'-phosphate
  modified_base 13: mod_base = OTHER; note = 2'-O-methylguanosine-3'-phosphate
  modified_base 14: mod_base = OTHER; note = 2'-deoxy-2'-fluoroadenosine-3'-phosphate
  modified_base 15: mod_base = OTHER; note = 2'-O-methyladenosine-3'-phosphate
  modified_base 16: mod_base = OTHER; note = 2'-deoxy-2'-fluoroadenosine-3'-phosphate
  modified_base 17: mod_base = OTHER; note = 2'-O-methyluridine-3'-phosphate
  modified_base 18: mod_base = OTHER; note = 2'-O-methylcytidine-3'-phosphate
  modified_base 19: mod_base = OTHER; note = 2'-O-methylcytidine-3'-phosphate
  modified_base 20: mod_base = OTHER; note = 2'-O-methylcytidine-3'-phosphate
  modified_base 21: mod_base = OTHER; note = 2'-O-methyladenosine-3'-phosphorothioate
  modified_base 22: mod_base = OTHER; note = 2'-O-methyluridine-3'-phosphorothioate
  modified_base 23: mod_base = OTHER; note = 2'-O-methylcytidine
tcttggttacatgaaatcccatc

SEQ ID NO: 238 - RNA, 23 nt, synthetic construct
  source 1..23: mol_type = other RNA
  modified_base 1: mod_base = OTHER; note = 2'-O-methyladenosine-3'-phosphorothioate
  modified_base 2: mod_base = OTHER; note = 2'-deoxy-2'-fluoroadenosine-3'-phosphorothioate
  modified_base 3: mod_base = OTHER; note = 2'-O-methyluridine-3'-phosphate
  modified_base 4: mod_base = OTHER; note = 2'-deoxy-2'-fluoroadenosine-3'-phosphate
  modified_base 5: mod_base = OTHER; note = 2'-O-methylcytidine-3'-phosphate
  modified_base 6: mod_base = OTHER; note = 2'-deoxy-2'-fluorouridine-3'-phosphate
  modified_base 7: mod_base = OTHER; note = 2'-O-methylcytidine-3'-phosphate
  modified_base 8: mod_base = OTHER; note = 2'-deoxy-2'-fluorouridine-3'-phosphate
  modified_base 9: mod_base = OTHER; note = 2'-O-methyluridine-3'-phosphate
  modified_base 10: mod_base = OTHER; note = 2'-deoxy-2'-fluoroguanosine-3'-phosphate
  modified_base 11: mod_base = OTHER; note = 2'-O-methylguanosine-3'-phosphate
  modified_base 12: mod_base = OTHER; note = 2'-O-methyluridine-3'-phosphate
  modified_base 13: mod_base = OTHER; note = 2'-O-methyluridine-3'-phosphate
  modified_base 14: mod_base = OTHER; note = 2'-deoxy-2'-fluoroadenosine-3'-phosphate
  modified_base 15: mod_base = OTHER; note = 2'-O-methylcytidine-3'-phosphate
  modified_base 16: mod_base = OTHER; note = 2'-deoxy-2'-fluoroadenosine-3'-phosphate
  modified_base 17: mod_base = OTHER; note = 2'-O-methyluridine-3'-phosphate
  modified_base 18: mod_base = OTHER; note = 2'-deoxy-2'-fluoroguanosine-3'-phosphate
  modified_base 19: mod_base = OTHER; note = 2'-O-methyladenosine-3'-phosphate
  modified_base 20: mod_base = OTHER; note = 2'-deoxy-2'-fluoroadenosine-3'-phosphate
  modified_base 21: mod_base = OTHER; note = 2'-O-methyladenosine-3'-phosphorothioate
  modified_base 22: mod_base = OTHER; note = 2'-O-methyluridine-3'-phosphorothioate
  modified_base 23: mod_base = OTHER; note = 2'-O-methylcytidine
aatactcttggttacatgaaatc

SEQ ID NO: 239 - RNA, 23 nt, synthetic construct
  source 1..23: mol_type = other RNA
  modified_base 1: mod_base = OTHER; note = 2'-O-methyladenosine-3'-phosphorothioate
  modified_base 2: mod_base = OTHER; note = 2'-deoxy-2'-fluoroadenosine-3'-phosphorothioate
  modified_base 3: mod_base = OTHER; note = 2'-O-methyluridine-3'-phosphate
  modified_base 4: mod_base = OTHER; note = 2'-O-methyladenosine-3'-phosphate
  modified_base 5: mod_base = OTHER; note = 2'-O-methylcytidine-3'-phosphate
  modified_base 6: mod_base = OTHER; note = 2'-deoxy-2'-fluorouridine-3'-phosphate
  modified_base 7: mod_base = OTHER; note = 2'-O-methylcytidine-3'-phosphate
  modified_base 8: mod_base = OTHER; note = 2'-deoxy-2'-fluorouridine-3'-phosphate
  modified_base 9: mod_base = OTHER; note = 2'-deoxy-2'-fluorouridine-3'-phosphate
  modified_base 10: mod_base = OTHER; note = 2'-O-methylguanosine-3'-phosphate
  modified_base 11: mod_base = OTHER; note = 2'-O-methylguanosine-3'-phosphate
  modified_base 12: mod_base = OTHER; note = 2'-O-methyluridine-3'-phosphate
  modified_base 13: mod_base = OTHER; note = 2'-O-methyluridine-3'-phosphate
  modified_base 14: mod_base = OTHER; note = 2'-deoxy-2'-fluoroadenosine-3'-phosphate
  modified_base 15: mod_base = OTHER; note = 2'-O-methylcytidine-3'-phosphate
  modified_base 16: mod_base = OTHER; note = 2'-deoxy-2'-fluoroadenosine-3'-phosphate
  modified_base 17: mod_base = OTHER; note = 2'-O-methyluridine-3'-phosphate
  modified_base 18: mod_base = OTHER; note = 2'-O-methylguanosine-3'-phosphate
  modified_base 19: mod_base = OTHER; note = 2'-O-methyladenosine-3'-phosphate
  modified_base 20: mod_base = OTHER; note = 2'-O-methyladenosine-3'-phosphate
  modified_base 21: mod_base = OTHER; note = 2'-O-methyladenosine-3'-phosphorothioate
  modified_base 22: mod_base = OTHER; note = 2'-O-methyluridine-3'-phosphorothioate
  modified_base 23: mod_base = OTHER; note = 2'-O-methylcytidine
aatactcttggttacatgaaatc

SEQ ID NO: 240 - RNA, 23 nt, synthetic construct
  source 1..23: mol_type = other RNA
  modified_base 1: mod_base = OTHER; note = 2'-O-methyladenosine-3'-phosphorothioate
  modified_base 2: mod_base = OTHER; note = 2'-deoxy-2'-fluoroadenosine-3'-phosphorothioate
  modified_base 3: mod_base = OTHER; note = 2'-O-methyluridine-3'-phosphate
  modified_base 4: mod_base = OTHER; note = 2'-O-methyladenosine-3'-phosphate
  modified_base 5: mod_base = OTHER; note = 2'-O-methylcytidine-3'-phosphate
  modified_base 6: mod_base = OTHER; note = 2'-deoxy-2'-fluorouridine-3'-phosphate
  modified_base 7: mod_base = OTHER; note = 2'-O-methylcytidine-3'-phosphate
  modified_base 8: mod_base = OTHER; note = 2'-O-methyluridine-3'-phosphate
  modified_base 9: mod_base = OTHER; note = 2'-O-methyluridine-3'-phosphate
  modified_base 10: mod_base = OTHER; note = 2'-O-methylguanosine-3'-phosphate
  modified_base 11: mod_base = OTHER; note = 2'-O-methylguanosine-3'-phosphate
  modified_base 12: mod_base = OTHER; note = 2'-O-methyluridine-3'-phosphate
  modified_base 13: mod_base = OTHER; note = 2'-O-methyluridine-3'-phosphate
  modified_base 14: mod_base = OTHER; note = 2'-deoxy-2'-fluoroadenosine-3'-phosphate
  modified_base 15: mod_base = OTHER; note = 2'-O-methylcytidine-3'-phosphate
  modified_base 16: mod_base = OTHER; note = 2'-deoxy-2'-fluoroadenosine-3'-phosphate
  modified_base 17: mod_base = OTHER; note = 2'-O-methyluridine-3'-phosphate
  modified_base 18: mod_base = OTHER; note = 2'-O-methylguanosine-3'-phosphate
  modified_base 19: mod_base = OTHER; note = 2'-O-methyladenosine-3'-phosphate
  modified_base 20: mod_base = OTHER; note = 2'-O-methyladenosine-3'-phosphate
  modified_base 21: mod_base = OTHER; note = 2'-O-methyladenosine-3'-phosphorothioate
  modified_base 22: mod_base = OTHER; note = 2'-O-methyluridine-3'-phosphorothioate
  modified_base 23: mod_base = OTHER; note = 2'-O-methylcytidine
aatactcttggttacatgaaatc

SEQ ID NO: 241 - RNA, 23 nt, synthetic construct
  source 1..23: mol_type = other RNA
  modified_base 1: mod_base = OTHER; note = 2'-O-methyladenosine-3'-phosphorothioate
  modified_base 2: mod_base = OTHER; note = 2'-deoxy-2'-fluoroadenosine-3'-phosphorothioate
  modified_base 3: mod_base = OTHER; note = 2'-O-methyluridine-3'-phosphate
  modified_base 4: mod_base = OTHER; note = 2'-deoxy-2'-fluoroguanosine-3'-phosphate
  modified_base 5: mod_base = OTHER; note = 2'-O-methylguanosine-3'-phosphate
  modified_base 6: mod_base = OTHER; note = 2'-deoxy-2'-fluoroadenosine-3'-phosphate
  modified_base 7: mod_base = OTHER; note = 2'-O-methyladenosine-3'-phosphate
  modified_base 8: mod_base = OTHER; note = 2'-deoxy-2'-fluorouridine-3'-phosphate
  modified_base 9: mod_base = OTHER; note = 2'-O-methyladenosine-3'-phosphate
  modified_base 10: mod_base = OTHER; note = 2'-deoxy-2'-fluorocytidine-3'-phosphate
  modified_base 11: mod_base = OTHER; note = 2'-O-methyluridine-3'-phosphate
  modified_base 12: mod_base = OTHER; note = 2'-O-methylcytidine-3'-phosphate
  modified_base 13: mod_base = OTHER; note = 2'-O-methyluridine-3'-phosphate
  modified_base 14: mod_base = OTHER; note = 2'-deoxy-2'-fluorouridine-3'-phosphate
  modified_base 15: mod_base = OTHER; note = 2'-O-methylguanosine-3'-phosphate
  modified_base 16: mod_base = OTHER; note = 2'-deoxy-2'-fluoroguanosine-3'-phosphate
  modified_base 17: mod_base = OTHER; note = 2'-O-methyluridine-3'-phosphate
  modified_base 18: mod_base = OTHER; note = 2'-deoxy-2'-fluorouridine-3'-phosphate
  modified_base 19: mod_base = OTHER; note = 2'-O-methyladenosine-3'-phosphate
  modified_base 20: mod_base = OTHER; note = 2'-deoxy-2'-fluorocytidine-3'-phosphate
  modified_base 21: mod_base = OTHER; note = 2'-O-methyladenosine-3'-phosphorothioate
  modified_base 22: mod_base = OTHER; note = 2'-O-methyluridine-3'-phosphorothioate
  modified_base 23: mod_base = OTHER; note = 2'-O-methylguanosine
aatggaatactcttggttacatg

SEQ ID NO: 242 - RNA, 23 nt, synthetic construct
  source 1..23: mol_type = other RNA
  modified_base 1: mod_base = OTHER; note = 2'-O-methyladenosine-3'-phosphorothioate
  modified_base 2: mod_base = OTHER; note = 2'-deoxy-2'-fluoroadenosine-3'-phosphorothioate
  modified_base 3: mod_base = OTHER; note = 2'-O-methyluridine-3'-phosphate
  modified_base 4: mod_base = OTHER; note = 2'-O-methylguanosine-3'-phosphate
  modified_base 5: mod_base = OTHER; note = 2'-O-methylguanosine-3'-phosphate
  modified_base 6: mod_base = OTHER; note = 2'-deoxy-2'-fluoroadenosine-3'-phosphate
  modified_base 7: mod_base = OTHER; note = 2'-O-methyladenosine-3'-phosphate
  modified_base 8: mod_base = OTHER; note = 2'-deoxy-2'-fluorouridine-3'-phosphate
  modified_base 9: mod_base = OTHER; note = 2'-deoxy-2'-fluoroadenosine-3'-phosphate
  modified_base 10: mod_base = OTHER; note = 2'-O-methylcytidine-3'-phosphate
  modified_base 11: mod_base = OTHER; note = 2'-O-methyluridine-3'-phosphate
  modified_base 12: mod_base = OTHER; note = 2'-O-methylcytidine-3'-phosphate
  modified_base 13: mod_base = OTHER; note = 2'-O-methyluridine-3'-phosphate
  modified_base 14: mod_base = OTHER; note = 2'-deoxy-2'-fluorouridine-3'-phosphate
  modified_base 15: mod_base = OTHER; note = 2'-O-methylguanosine-3'-phosphate
  modified_base 16: mod_base = OTHER; note = 2'-deoxy-2'-fluoroguanosine-3'-phosphate
  modified_base 17: mod_base = OTHER; note = 2'-O-methyluridine-3'-phosphate
  modified_base 18: mod_base = OTHER; note = 2'-O-methyluridine-3'-phosphate
  modified_base 19: mod_base = OTHER; note = 2'-O-methyladenosine-3'-phosphate
  modified_base 20: mod_base = OTHER; note = 2'-O-methylcytidine-3'-phosphate
  modified_base 21: mod_base = OTHER; note = 2'-O-methyladenosine-3'-phosphorothioate
  modified_base 22: mod_base = OTHER; note = 2'-O-methyluridine-3'-phosphorothioate
  modified_base 23: mod_base = OTHER; note = 2'-O-methylguanosine
aatggaatactcttggttacatg

SEQ ID NO: 243 - RNA, 23 nt, synthetic construct
  source 1..23: mol_type = other RNA
  modified_base 1: mod_base = OTHER; note = 2'-O-methyladenosine-3'-phosphorothioate
  modified_base 2: mod_base = OTHER; note = 2'-deoxy-2'-fluoroadenosine-3'-phosphorothioate
  modified_base 3: mod_base = OTHER; note = 2'-O-methyluridine-3'-phosphate
  modified_base 4: mod_base = OTHER; note = 2'-O-methylguanosine-3'-phosphate
  modified_base 5: mod_base = OTHER; note = 2'-O-methylguanosine-3'-phosphate
  modified_base 6: mod_base = OTHER; note = 2'-deoxy-2'-fluoroadenosine-3'-phosphate
  modified_base 7: mod_base = OTHER; note = 2'-O-methyladenosine-3'-phosphate
  modified_base 8: mod_base = OTHER; note = 2'-O-methyluridine-3'-phosphate
  modified_base 9: mod_base = OTHER; note = 2'-O-methyladenosine-3'-phosphate
  modified_base 10: mod_base = OTHER; note = 2'-O-methylcytidine-3'-phosphate
  modified_base 11: mod_base = OTHER; note = 2'-O-methyluridine-3'-phosphate
  modified_base 12: mod_base = OTHER; note = 2'-O-methylcytidine-3'-phosphate
  modified_base 13: mod_base = OTHER; note = 2'-O-methyluridine-3'-phosphate
  modified_base 14: mod_base = OTHER; note = 2'-deoxy-2'-fluorouridine-3'-phosphate
  modified_base 15: mod_base = OTHER; note = 2'-O-methylguanosine-3'-phosphate
  modified_base 16: mod_base = OTHER; note = 2'-deoxy-2'-fluoroguanosine-3'-phosphate
  modified_base 17: mod_base = OTHER; note = 2'-O-methyluridine-3'-phosphate
  modified_base 18: mod_base = OTHER; note = 2'-O-methyluridine-3'-phosphate
  modified_base 19: mod_base = OTHER; note = 2'-O-methyladenosine-3'-phosphate
  modified_base 20: mod_base = OTHER; note = 2'-O-methylcytidine-3'-phosphate
  modified_base 21: mod_base = OTHER; note = 2'-O-methyladenosine-3'-phosphorothioate
  modified_base 22: mod_base = OTHER; note = 2'-O-methyluridine-3'-phosphorothioate
  modified_base 23: mod_base = OTHER; note = 2'-O-methylguanosine
aatggaatactcttggttacatg

SEQ ID NO: 244 - RNA, 23 nt, synthetic construct
  source 1..23: mol_type = other RNA
  modified_base 1: mod_base = OTHER; note = 2'-O-methyladenosine-3'-phosphorothioate
  modified_base 2: mod_base = OTHER; note = 2'-deoxy-2'-fluoroadenosine-3'-phosphorothioate
  modified_base 3: mod_base = OTHER; note = 2'-O-methyladenosine-3'-phosphate
  modified_base 4: mod_base = OTHER; note = 2'-O-methyladenosine-3'-phosphate
  modified_base 5: mod_base = OTHER; note = 2'-O-methyladenosine-3'-phosphate
  modified_base 6: mod_base = OTHER; note = 2'-deoxy-2'-fluorouridine-3'-phosphate
  modified_base 7: mod_base = OTHER; note = 2'-O-methylguanosine-3'-phosphate
  modified_base 8: mod_base = OTHER; note = 2'-deoxy-2'-fluoroguanosine-3'-phosphate
  modified_base 9: mod_base = OTHER; note = 2'-deoxy-2'-fluoroadenosine-3'-phosphate
  modified_base 10: mod_base = OTHER; note = 2'-O-methyladenosine-3'-phosphate
  modified_base 11: mod_base = OTHER; note = 2'-O-methyluridine-3'-phosphate
  modified_base 12: mod_base = OTHER; note = 2'-O-methyladenosine-3'-phosphate
  modified_base 13: mod_base = OTHER; note = 2'-O-methylcytidine-3'-phosphate
  modified_base 14: mod_base = OTHER; note = 2'-deoxy-2'-fluorouridine-3'-phosphate
  modified_base 15: mod_base = OTHER; note = 2'-O-methylcytidine-3'-phosphate
  modified_base 16: mod_base = OTHER; note = 2'-deoxy-2'-fluorouridine-3'-phosphate
  modified_base 17: mod_base = OTHER; note = 2'-O-methyluridine-3'-phosphate
  modified_base 18: mod_base = OTHER; note = 2'-O-methylguanosine-3'-phosphate
  modified_base 19: mod_base = OTHER; note = 2'-O-methylguanosine-3'-phosphate
  modified_base 20: mod_base = OTHER; note = 2'-O-methyluridine-3'-phosphate
  modified_base 21: mod_base = OTHER; note = 2'-O-methyluridine-3'-phosphorothioate
  modified_base 22: mod_base = OTHER; note = 2'-O-methyladenosine-3'-phosphorothioate
  modified_base 23: mod_base = OTHER; note = 2'-O-methylcytidine
aaaaatggaatactcttggttac

SEQ ID NO: 245 - RNA, 23 nt, synthetic construct
  source 1..23: mol_type = other RNA
  modified_base 1: mod_base = OTHER; note = 2'-O-methyladenosine-3'-phosphorothioate
  modified_base 2: mod_base = OTHER; note = 2'-deoxy-2'-fluoroadenosine-3'-phosphorothioate
  modified_base 3: mod_base = OTHER; note = 2'-O-methyladenosine-3'-phosphate
  modified_base 4: mod_base = OTHER; note = 2'-deoxy-2'-fluoroadenosine-3'-phosphate
  modified_base 5: mod_base = OTHER; note = 2'-O-methyladenosine-3'-phosphate
  modified_base 6: mod_base = OTHER; note = 2'-deoxy-2'-fluorouridine-3'-phosphate
  modified_base 7: mod_base = OTHER; note = 2'-O-methylguanosine-3'-phosphate
  modified_base 8: mod_base = OTHER; note = 2'-deoxy-2'-fluoroguanosine-3'-phosphate
  modified_base 9: mod_base = OTHER; note = 2'-O-methyladenosine-3'-phosphate
  modified_base 10: mod_base = OTHER; note = 2'-deoxy-2'-fluoroadenosine-3'-phosphate
  modified_base 11: mod_base = OTHER; note = 2'-O-methyluridine-3'-phosphate
  modified_base 12: mod_base = OTHER; note = 2'-O-methyladenosine-3'-phosphate
  modified_base 13: mod_base = OTHER; note = 2'-O-methylcytidine-3'-phosphate
  modified_base 14: mod_base = OTHER; note = 2'-deoxy-2'-fluorouridine-3'-phosphate
  modified_base 15: mod_base = OTHER; note = 2'-O-methylcytidine-3'-phosphate
  modified_base 16: mod_base = OTHER; note = 2'-deoxy-2'-fluorouridine-3'-phosphate
  modified_base 17: mod_base = OTHER; note = 2'-O-methyluridine-3'-phosphate
  modified_base 18: mod_base = OTHER; note = 2'-deoxy-2'-fluoroguanosine-3'-phosphate
  modified_base 19: mod_base = OTHER; note = 2'-O-methylguanosine-3'-phosphate
  modified_base 20: mod_base = OTHER; note = 2'-deoxy-2'-fluorouridine-3'-phosphate
  modified_base 21: mod_base = OTHER; note = 2'-O-methyluridine-3'-phosphorothioate
  modified_base 22: mod_base = OTHER; note = 2'-O-methyladenosine-3'-phosphorothioate
  modified_base 23: mod_base = OTHER; note = 2'-O-methylcytidine
aaaaatggaatactcttggttac

SEQ ID NO: 246 - RNA, 23 nt, synthetic construct
  source 1..23: mol_type = other RNA
  modified_base 1: mod_base = OTHER; note = 2'-O-methyladenosine-3'-phosphorothioate
  modified_base 2: mod_base = OTHER; note = 2'-deoxy-2'-fluoroadenosine-3'-phosphorothioate
  modified_base 3: mod_base = OTHER; note = 2'-O-methyladenosine-3'-phosphate
  modified_base 4: mod_base = OTHER; note = 2'-O-methyladenosine-3'-phosphate
  modified_base 5: mod_base = OTHER; note = 2'-O-methyladenosine-3'-phosphate
  modified_base 6: mod_base = OTHER; note = 2'-deoxy-2'-fluorouridine-3'-phosphate
  modified_base 7: mod_base = OTHER; note = 2'-O-methylguanosine-3'-phosphate
  modified_base 8: mod_base = OTHER; note = 2'-O-methylguanosine-3'-phosphate
  modified_base 9: mod_base = OTHER; note = 2'-O-methyladenosine-3'-phosphate
  modified_base 10: mod_base = OTHER; note = 2'-O-methyladenosine-3'-phosphate
  modified_base 11: mod_base = OTHER; note = 2'-O-methyluridine-3'-phosphate
  modified_base 12: mod_base = OTHER; note = 2'-O-methyladenosine-3'-phosphate
  modified_base 13: mod_base = OTHER; note = 2'-O-methylcytidine-3'-phosphate
  modified_base 14: mod_base = OTHER; note = 2'-deoxy-2'-fluorouridine-3'-phosphate
  modified_base 15: mod_base = OTHER; note = 2'-O-methylcytidine-3'-phosphate
  modified_base 16: mod_base = OTHER; note = 2'-deoxy-2'-fluorouridine-3'-phosphate
  modified_base 17: mod_base = OTHER; note = 2'-O-methyluridine-3'-phosphate
  modified_base 18: mod_base = OTHER; note = 2'-O-methylguanosine-3'-phosphate
  modified_base 19: mod_base = OTHER; note = 2'-O-methylguanosine-3'-phosphate
  modified_base 20: mod_base = OTHER; note = 2'-O-methyluridine-3'-phosphate
  modified_base 21: mod_base = OTHER; note = 2'-O-methyluridine-3'-phosphorothioate
  modified_base 22: mod_base = OTHER; note = 2'-O-methyladenosine-3'-phosphorothioate
  modified_base 23: mod_base = OTHER; note = 2'-O-methylcytidine
aaaaatggaatactcttggttac

SEQ ID NO: 247 - RNA, 23 nt, synthetic construct
  source 1..23: mol_type = other RNA
  modified_base 1: mod_base = OTHER; note = 2'-O-methyladenosine-3'-phosphorothioate
  modified_base 2: mod_base = OTHER; note = 2'-deoxy-2'-fluoroadenosine-3'-phosphorothioate
  modified_base 3: mod_base = OTHER; note = 2'-O-methyladenosine-3'-phosphate
  modified_base 4: mod_base = OTHER; note = 2'-deoxy-2'-fluoroadenosine-3'-phosphate
  modified_base 5: mod_base = OTHER; note = 2'-O-methylcytidine-3'-phosphate
  modified_base 6: mod_base = OTHER; note = 2'-deoxy-2'-fluoroadenosine-3'-phosphate
  modified_base 7: mod_base = OTHER; note = 2'-O-methylcytidine-3'-phosphate
  modified_base 8: mod_base = OTHER; note = 2'-deoxy-2'-fluorouridine-3'-phosphate
  modified_base 9: mod_base = OTHER; note = 2'-O-methylguanosine-3'-phosphate
  modified_base 10: mod_base = OTHER; note = 2'-deoxy-2'-fluorocytidine-3'-phosphate
  modified_base 11: mod_base = OTHER; note = 2'-O-methyluridine-3'-phosphate
  modified_base 12: mod_base = OTHER; note = 2'-O-methyluridine-3'-phosphate
  modified_base 13: mod_base = OTHER; note = 2'-O-methyluridine-3'-phosphate
  modified_base 14: mod_base = OTHER; note = 2'-deoxy-2'-fluoroadenosine-3'-phosphate
  modified_base 15: mod_base = OTHER; note = 2'-O-methylguanosine-3'-phosphate
  modified_base 16: mod_base = OTHER; note = 2'-deoxy-2'-fluorouridine-3'-phosphate
  modified_base 17: mod_base = OTHER; note = 2'-O-methyladenosine-3'-phosphate
  modified_base 18: mod_base = OTHER; note = 2'-deoxy-2'-fluoroadenosine-3'-phosphate
  modified_base 19: mod_base = OTHER; note = 2'-O-methyladenosine-3'-phosphate
  modified_base 20: mod_base = OTHER; note = 2'-deoxy-2'-fluoroadenosine-3'-phosphate
  modified_base 21: mod_base = OTHER; note = 2'-O-methyladenosine-3'-phosphorothioate
  modified_base 22: mod_base = OTHER; note = 2'-O-methyluridine-3'-phosphorothioate
  modified_base 23: mod_base = OTHER; note = 2'-O-methylguanosine
aaaacactgctttagtaaaaatg

SEQ ID NO: 248 - RNA, 23 nt, synthetic construct
  source 1..23: mol_type = other RNA
  modified_base 1: mod_base = OTHER; note = 2'-O-methyladenosine-3'-phosphorothioate
  modified_base 2: mod_base = OTHER; note = 2'-deoxy-2'-fluoroadenosine-3'-phosphorothioate
  modified_base 3: mod_base = OTHER; note = 2'-O-methyladenosine-3'-phosphate
  modified_base 4: mod_base = OTHER; note = 2'-O-methyladenosine-3'-phosphate
  modified_base 5: mod_base = OTHER; note = 2'-O-methylcytidine-3'-phosphate
  modified_base 6: mod_base = OTHER; note = 2'-deoxy-2'-fluoroadenosine-3'-phosphate
  modified_base 7: mod_base = OTHER; note = 2'-O-methylcytidine-3'-phosphate
  modified_base 8: mod_base = OTHER; note = 2'-deoxy-2'-fluorouridine-3'-phosphate
  modified_base 9: mod_base = OTHER; note = 2'-deoxy-2'-fluoroguanosine-3'-phosphate
  modified_base 10: mod_base = OTHER; note = 2'-O-methylcytidine-3'-phosphate
  modified_base 11: mod_base = OTHER; note = 2'-O-methyluridine-3'-phosphate
  modified_base 12: mod_base = OTHER; note = 2'-O-methyluridine-3'-phosphate
  modified_base 13: mod_base = OTHER; note = 2'-O-methyluridine-3'-phosphate
  modified_base 14: mod_base = OTHER; note = 2'-deoxy-2'-fluoroadenosine-3'-phosphate
  modified_base 15: mod_base = OTHER; note = 2'-O-methylguanosine-3'-phosphate
  modified_base 16: mod_base = OTHER; note = 2'-deoxy-2'-fluorouridine-3'-phosphate
  modified_base 17: mod_base = OTHER; note = 2'-O-methyladenosine-3'-phosphate
  modified_base 18: mod_base = OTHER; note = 2'-O-methyladenosine-3'-phosphate
  modified_base 19: mod_base = OTHER; note = 2'-O-methyladenosine-3'-phosphate
  modified_base 20: mod_base = OTHER; note = 2'-O-methyladenosine-3'-phosphate
  modified_base 21: mod_base = OTHER; note = 2'-O-methyladenosine-3'-phosphorothioate
  modified_base 22: mod_base = OTHER; note = 2'-O-methyluridine-3'-phosphorothioate
  modified_base 23: mod_base = OTHER; note = 2'-O-methylguanosine
aaaacactgctttagtaaaaatg

SEQ ID NO: 249 - RNA, 23 nt, synthetic construct
  source 1..23: mol_type = other RNA
  modified_base 1: mod_base = OTHER; note = 2'-O-methyladenosine-3'-phosphorothioate
  modified_base 2: mod_base = OTHER; note = 2'-deoxy-2'-fluoroadenosine-3'-phosphorothioate
  modified_base 3: mod_base = OTHER; note = 2'-O-methyladenosine-3'-phosphate
  modified_base 4: mod_base = OTHER; note = 2'-O-methyladenosine-3'-phosphate
  modified_base 5: mod_base = OTHER; note = 2'-O-methylcytidine-3'-phosphate
  modified_base 6: mod_base = OTHER; note = 2'-deoxy-2'-fluoroadenosine-3'-phosphate
  modified_base 7: mod_base = OTHER; note = 2'-O-methylcytidine-3'-phosphate
  modified_base 8: mod_base = OTHER; note = 2'-O-methyluridine-3'-phosphate
  modified_base 9: mod_base = OTHER; note = 2'-O-methylguanosine-3'-phosphate
  modified_base 10: mod_base = OTHER; note = 2'-O-methylcytidine-3'-phosphate
  modified_base 11: mod_base = OTHER; note = 2'-O-methyluridine-3'-phosphate
  modified_base 12: mod_base = OTHER; note = 2'-O-methyluridine-3'-phosphate
  modified_base 13: mod_base = OTHER; note = 2'-O-methyluridine-3'-phosphate
  modified_base 14: mod_base = OTHER; note = 2'-deoxy-2'-fluoroadenosine-3'-phosphate
  modified_base 15: mod_base = OTHER; note = 2'-O-methylguanosine-3'-phosphate
  modified_base 16: mod_base = OTHER; note = 2'-deoxy-2'-fluorouridine-3'-phosphate
  modified_base 17: mod_base = OTHER; note = 2'-O-methyladenosine-3'-phosphate
  modified_base 18: mod_base = OTHER; note = 2'-O-methyladenosine-3'-phosphate
  modified_base 19: mod_base = OTHER; note = 2'-O-methyladenosine-3'-phosphate
  modified_base 20: mod_base = OTHER; note = 2'-O-methyladenosine-3'-phosphate
  modified_base 21: mod_base = OTHER; note = 2'-O-methyladenosine-3'-phosphorothioate
  modified_base 22: mod_base = OTHER; note = 2'-O-methyluridine-3'-phosphorothioate
  modified_base 23: mod_base = OTHER; note = 2'-O-methylguanosine
aaaacactgctttagtaaaaatg

SEQ ID NO: 250 - RNA, 23 nt, synthetic construct
  source 1..23: mol_type = other RNA
  modified_base 1: mod_base = OTHER; note = 2'-O-methyluridine-3'-phosphorothioate
  modified_base 2: mod_base = OTHER; note = 2'-deoxy-2'-fluorouridine-3'-phosphorothioate
  modified_base 3: mod_base = OTHER; note = 2'-O-methylguanosine-3'-phosphate
  modified_base 4: mod_base = OTHER; note = 2'-deoxy-2'-fluoroadenosine-3'-phosphate
  modified_base 5: mod_base = OTHER; note = 2'-O-methyladenosine-3'-phosphate
  modified_base 6: mod_base = OTHER; note = 2'-deoxy-2'-fluoroadenosine-3'-phosphate
  modified_base 7: mod_base = OTHER; note = 2'-O-methyladenosine-3'-phosphate
  modified_base 8: mod_base = OTHER; note = 2'-deoxy-2'-fluorocytidine-3'-phosphate
  modified_base 9: mod_base = OTHER; note = 2'-O-methyladenosine-3'-phosphate
  modified_base 10: mod_base = OTHER; note = 2'-deoxy-2'-fluorocytidine-3'-phosphate
  modified_base 11: mod_base = OTHER; note = 2'-O-methyluridine-3'-phosphate
  modified_base 12: mod_base = OTHER; note = 2'-O-methylguanosine-3'-phosphate
  modified_base 13: mod_base = OTHER; note = 2'-O-methylcytidine-3'-phosphate
  modified_base 14: mod_base = OTHER; note = 2'-deoxy-2'-fluorouridine-3'-phosphate
  modified_base 15: mod_base = OTHER; note = 2'-O-methyluridine-3'-phosphate
  modified_base 16: mod_base = OTHER; note = 2'-deoxy-2'-fluorouridine-3'-phosphate
  modified_base 17: mod_base = OTHER; note = 2'-O-methyladenosine-3'-phosphate
  modified_base 18: mod_base = OTHER; note = 2'-deoxy-2'-fluoroguanosine-3'-phosphate
  modified_base 19: mod_base = OTHER; note = 2'-O-methyluridine-3'-phosphate
  modified_base 20: mod_base = OTHER; note = 2'-deoxy-2'-fluoroadenosine-3'-phosphate
  modified_base 21: mod_base = OTHER; note = 2'-O-methyladenosine-3'-phosphorothioate
  modified_base 22: mod_base = OTHER; note = 2'-O-methyladenosine-3'-phosphorothioate
  modified_base 23: mod_base = OTHER; note = 2'-O-methyladenosine
ttgaaaacactgctttagtaaaa

SEQ ID NO: 251 - RNA, 23 nt, synthetic construct
  source 1..23: mol_type = other RNA
  modified_base 1: mod_base = OTHER; note = 2'-O-methyluridine-3'-phosphorothioate
  modified_base 2: mod_base = OTHER; note = 2'-deoxy-2'-fluoroadenosine-3'-phosphorothioate
  modified_base 3: mod_base = OTHER; note = 2'-O-methylguanosine-3'-phosphate
  modified_base 4: mod_base = OTHER; note = 2'-deoxy-2'-fluoroguanosine-3'-phosphate
  modified_base 5: mod_base = OTHER; note = 2'-O-methyluridine-3'-phosphate
  modified_base 6: mod_base = OTHER; note = 2'-deoxy-2'-fluoroguanosine-3'-phosphate
  modified_base 7: mod_base = OTHER; note = 2'-O-methyladenosine-3'-phosphate
  modified_base 8: mod_base = OTHER; note = 2'-deoxy-2'-fluoroadenosine-3'-phosphate
  modified_base 9: mod_base = OTHER; note = 2'-O-methyladenosine-3'-phosphate
  modified_base 10: mod_base = OTHER; note = 2'-deoxy-2'-fluoroadenosine-3'-phosphate
  modified_base 11: mod_base = OTHER; note = 2'-O-methylcytidine-3'-phosphate
  modified_base 12: mod_base = OTHER; note = 2'-O-methyladenosine-3'-phosphate
  modified_base 13: mod_base = OTHER; note = 2'-O-methylcytidine-3'-phosphate
  modified_base 14: mod_base = OTHER; note = 2'-deoxy-2'-fluorouridine-3'-phosphate
  modified_base 15: mod_base = OTHER; note = 2'-O-methylguanosine-3'-phosphate
  modified_base 16: mod_base = OTHER; note = 2'-deoxy-2'-fluorocytidine-3'-phosphate
  modified_base 17: mod_base = OTHER; note = 2'-O-methyluridine-3'-phosphate
  modified_base 18: mod_base = OTHER; note = 2'-deoxy-2'-fluorouridine-3'-phosphate
  modified_base 19: mod_base = OTHER; note = 2'-O-methyluridine-3'-phosphate
  modified_base 20: mod_base = OTHER; note = 2'-deoxy-2'-fluoroadenosine-3'-phosphate
  modified_base 21: mod_base = OTHER; note = 2'-O-methylguanosine-3'-phosphorothioate
  modified_base 22: mod_base = OTHER; note = 2'-O-methyluridine-3'-phosphorothioate
  modified_base 23: mod_base = OTHER; note = 2'-O-methyladenosine
taggtgaaaacactgctttagta

SEQ ID NO: 252 - RNA, 23 nt, synthetic construct
  source 1..23: mol_type = other RNA
  modified_base 1: mod_base = OTHER; note = 2'-O-methyluridine-3'-phosphorothioate
  modified_base 2: mod_base = OTHER; note = 2'-deoxy-2'-fluoroadenosine-3'-phosphorothioate
  modified_base 3: mod_base = OTHER; note = 2'-O-methylguanosine-3'-phosphate
  modified_base 4: mod_base = OTHER; note = 2'-O-methylguanosine-3'-phosphate
  modified_base 5: mod_base = OTHER; note = 2'-O-methyluridine-3'-phosphate
  modified_base 6: mod_base = OTHER; note = 2'-deoxy-2'-fluoroguanosine-3'-phosphate
  modified_base 7: mod_base = OTHER; note = 2'-O-methyladenosine-3'-phosphate
  modified_base 8: mod_base = OTHER; note = 2'-O-methyladenosine-3'-phosphate
  modified_base 9: mod_base = OTHER; note = 2'-O-methyladenosine-3'-phosphate
  modified_base 10: mod_base = OTHER; note = 2'-O-methyladenosine-3'-phosphate
  modified_base 11: mod_base = OTHER; note = 2'-O-methylcytidine-3'-phosphate
  modified_base 12: mod_base = OTHER; note = 2'-O-methyladenosine-3'-phosphate
  modified_base 13: mod_base = OTHER; note = 2'-O-methylcytidine-3'-phosphate
  modified_base 14: mod_base = OTHER; note = 2'-deoxy-2'-fluorouridine-3'-phosphate
  modified_base 15: mod_base = OTHER; note = 2'-O-methylguanosine-3'-phosphate
  modified_base 16: mod_base = OTHER; note = 2'-deoxy-2'-fluorocytidine-3'-phosphate
  modified_base 17: mod_base = OTHER; note = 2'-O-methyluridine-3'-phosphate
  modified_base 18: mod_base = OTHER; note = 2'-O-methyluridine-3'-phosphate
  modified_base 19: mod_base = OTHER; note = 2'-O-methyluridine-3'-phosphate
  modified_base 20: mod_base = OTHER; note = 2'-O-methyladenosine-3'-phosphate
  modified_base 21: mod_base = OTHER; note = 2'-O-methylguanosine-3'-phosphorothioate
  modified_base 22: mod_base = OTHER; note = 2'-O-methyluridine-3'-phosphorothioate
  modified_base 23: mod_base = OTHER; note = 2'-O-methyladenosine
taggtgaaaacactgctttagta

SEQ ID NO: 253 - RNA, 23 nt, synthetic construct
  source 1..23: mol_type = other RNA
  modified_base 1: mod_base = OTHER; note = 2'-O-methyluridine-3'-phosphorothioate
  modified_base 2: mod_base = OTHER; note = 2'-deoxy-2'-fluoroadenosine-3'-phosphorothioate
  modified_base 3: mod_base = OTHER; note = 2'-O-methylguanosine-3'-phosphate
  modified_base 4: mod_base = OTHER; note = 2'-O-methylguanosine-3'-phosphate
  modified_base 5: mod_base = OTHER; note = 2'-O-methyluridine-3'-phosphate
  modified_base 6: mod_base = OTHER; note = 2'-deoxy-2'-fluoroguanosine-3'-phosphate
  modified_base 7: mod_base = OTHER; note = 2'-O-methyladenosine-3'-phosphate
  modified_base 8: mod_base = OTHER; note = 2'-deoxy-2'-fluoroadenosine-3'-phosphate
  modified_base 9: mod_base = OTHER; note = 2'-deoxy-2'-fluoroadenosine-3'-phosphate
  modified_base 10: mod_base = OTHER; note = 2'-O-methyladenosine-3'-phosphate
  modified_base 11: mod_base = OTHER; note = 2'-O-methylcytidine-3'-phosphate
  modified_base 12: mod_base = OTHER; note = 2'-O-methyladenosine-3'-phosphate
  modified_base 13: mod_base = OTHER; note = 2'-O-methylcytidine-3'-phosphate
  modified_base 14: mod_base = OTHER; note = 2'-deoxy-2'-fluorouridine-3'-phosphate
  modified_base 15: mod_base = OTHER; note = 2'-O-methylguanosine-3'-phosphate
  modified_base 16: mod_base = OTHER; note = 2'-deoxy-2'-fluorocytidine-3'-phosphate
  modified_base 17: mod_base = OTHER; note = 2'-O-methyluridine-3'-phosphate
  modified_base 18: mod_base = OTHER; note = 2'-O-methyluridine-3'-phosphate
  modified_base 19: mod_base = OTHER; note = 2'-O-methyluridine-3'-phosphate
  modified_base 20: mod_base = OTHER; note = 2'-O-methyladenosine-3'-phosphate
  modified_base 21: mod_base = OTHER; note = 2'-O-methylguanosine-3'-phosphorothioate
  modified_base 22: mod_base = OTHER; note = 2'-O-methyluridine-3'-phosphorothioate
  modified_base 23: mod_base = OTHER; note = 2'-O-methyladenosine
taggtgaaaacactgctttagta

SEQ ID NO: 254 - RNA, 23 nt, synthetic construct
  source 1..23: mol_type = other RNA
  modified_base 1: mod_base = OTHER; note = 2'-O-methyluridine-3'-phosphorothioate
  modified_base 2: mod_base = OTHER; note = 2'-deoxy-2'-fluoroadenosine-3'-phosphorothioate
  modified_base 3: mod_base = OTHER; note = 2'-O-methyladenosine-3'-phosphate
  modified_base 4: mod_base = OTHER; note = 2'-O-methyluridine-3'-phosphate
  modified_base 5: mod_base = OTHER; note = 2'-O-methylguanosine-3'-phosphate
  modified_base 6: mod_base = OTHER; note = 2'-deoxy-2'-fluorouridine-3'-phosphate
  modified_base 7: mod_base = OTHER; note = 2'-O-methyluridine-3'-phosphate
  modified_base 8: mod_base = OTHER; note = 2'-O-methyluridine-3'-phosphate
  modified_base 9: mod_base = OTHER; note = 2'-O-methyluridine-3'-phosphate
  modified_base 10: mod_base = OTHER; note = 2'-O-methyladenosine-3'-phosphate
  modified_base 11: mod_base = OTHER; note = 2'-O-methyluridine-3'-phosphate
  modified_base 12: mod_base = OTHER; note = 2'-O-methyluridine-3'-phosphate
  modified_base 13: mod_base = OTHER; note = 2'-O-methylguanosine-3'-phosphate
  modified_base 14: mod_base = OTHER; note = 2'-deoxy-2'-fluorouridine-3'-phosphate
  modified_base 15: mod_base = OTHER; note = 2'-O-methylcytidine-3'-phosphate
  modified_base 16: mod_base = OTHER; note = 2'-deoxy-2'-fluorouridine-3'-phosphate
  modified_base 17: mod_base = OTHER; note = 2'-O-methylcytidine-3'-phosphate
  modified_base 18: mod_base = OTHER; note = 2'-O-methyluridine-3'-phosphate
  modified_base 19: mod_base = OTHER; note = 2'-O-methylguanosine-3'-phosphate
  modified_base 20: mod_base = OTHER; note = 2'-O-methylcytidine-3'-phosphate
  modified_base 21: mod_base = OTHER; note = 2'-O-methylcytidine-3'-phosphorothioate
  modified_base 22: mod_base = OTHER; note = 2'-O-methyluridine-3'-phosphorothioate
  modified_base 23: mod_base = OTHER; note = 2'-O-methylguanosine
taatgttttattgtctctgcctg

SEQ ID NO: 255 - RNA, 23 nt, synthetic construct
  source 1..23: mol_type = other RNA
  modified_base 1: mod_base = OTHER; note = 2'-O-methyluridine-3'-phosphorothioate
  modified_base 2: mod_base = OTHER; note = 2'-deoxy-2'-fluoroadenosine-3'-phosphorothioate
  modified_base 3: mod_base = OTHER; note = 2'-O-methyladenosine-3'-phosphate
  modified_base 4: mod_base = OTHER; note = 2'-O-methyluridine-3'-phosphate
  modified_base 5: mod_base = OTHER; note = 2'-O-methylguanosine-3'-phosphate
  modified_base 6: mod_base = OTHER; note = 2'-deoxy-2'-fluorouridine-3'-phosphate
  modified_base 7: mod_base = OTHER; note = 2'-O-methyluridine-3'-phosphate
  modified_base 8: mod_base = OTHER; note = 2'-deoxy-2'-fluorouridine-3'-phosphate
  modified_base 9: mod_base = OTHER; note = 2'-deoxy-2'-fluorouridine-3'-phosphate
  modified_base 10: mod_base = OTHER; note = 2'-O-methyladenosine-3'-phosphate
  modified_base 11: mod_base = OTHER; note = 2'-O-methyluridine-3'-phosphate
  modified_base 12: mod_base = OTHER; note = 2'-O-methyluridine-3'-phosphate
  modified_base 13: mod_base = OTHER; note = 2'-O-methylguanosine-3'-phosphate
  modified_base 14: mod_base = OTHER; note = 2'-deoxy-2'-fluorouridine-3'-phosphate
  modified_base 15: mod_base = OTHER; note = 2'-O-methylcytidine-3'-phosphate
  modified_base 16: mod_base = OTHER; note = 2'-deoxy-2'-fluorouridine-3'-phosphate
  modified_base 17: mod_base = OTHER; note = 2'-O-methylcytidine-3'-phosphate
  modified_base 18: mod_base = OTHER; note = 2'-O-methyluridine-3'-phosphate
  modified_base 19: mod_base = OTHER; note = 2'-O-methylguanosine-3'-phosphate
  modified_base 20: mod_base = OTHER; note = 2'-O-methylcytidine-3'-phosphate
  modified_base 21: mod_base = OTHER; note = 2'-O-methylcytidine-3'-phosphorothioate
  modified_base 22: mod_base = OTHER; note = 2'-O-methyluridine-3'-phosphorothioate
  modified_base 23: mod_base = OTHER; note = 2'-O-methylguanosine
taatgttttattgtctctgcctg

SEQ ID NO: 256 - RNA, 23 nt, synthetic construct
  source 1..23: mol_type = other RNA
  modified_base 1: mod_base = OTHER; note = 2'-O-methyluridine-3'-phosphorothioate
  modified_base 2: mod_base = OTHER; note = 2'-deoxy-2'-fluoroadenosine-3'-phosphorothioate
  modified_base 3: mod_base = OTHER; note = 2'-O-methyladenosine-3'-phosphate
  modified_base 4: mod_base = OTHER; note = 2'-deoxy-2'-fluorouridine-3'-phosphate
  modified_base 5: mod_base = OTHER; note = 2'-O-methylguanosine-3'-phosphate
  modified_base 6: mod_base = OTHER; note = 2'-deoxy-2'-fluorouridine-3'-phosphate
  modified_base 7: mod_base = OTHER; note = 2'-O-methyluridine-3'-phosphate
  modified_base 8: mod_base = OTHER; note = 2'-deoxy-2'-fluorouridine-3'-phosphate
  modified_base 9: mod_base = OTHER; note = 2'-O-methyluridine-3'-phosphate
  modified_base 10: mod_base = OTHER; note = 2'-deoxy-2'-fluoroadenosine-3'-phosphate
  modified_base 11: mod_base = OTHER; note = 2'-O-methyluridine-3'-phosphate
  modified_base 12: mod_base = OTHER; note = 2'-O-methyluridine-3'-phosphate
  modified_base 13: mod_base = OTHER; note = 2'-O-methylguanosine-3'-phosphate
  modified_base 14: mod_base = OTHER; note = 2'-deoxy-2'-fluorouridine-3'-phosphate
  modified_base 15: mod_base = OTHER; note = 2'-O-methylcytidine-3'-phosphate
  modified_base 16: mod_base = OTHER; note = 2'-deoxy-2'-fluorouridine-3'-phosphate
  modified_base 17: mod_base = OTHER; note = 2'-O-methylcytidine-3'-phosphate
  modified_base 18: mod_base = OTHER; note = 2'-deoxy-2'-fluorouridine-3'-phosphate
  modified_base 19: mod_base = OTHER; note = 2'-O-methylguanosine-3'-phosphate
  modified_base 20: mod_base = OTHER; note = 2'-deoxy-2'-fluorocytidine-3'-phosphate
  modified_base 21: mod_base = OTHER; note = 2'-O-methylcytidine-3'-phosphorothioate
  modified_base 22: mod_base = OTHER; note = 2'-O-methyluridine-3'-phosphorothioate
  modified_base 23: mod_base = OTHER; note = 2'-O-methylguanosine
taatgttttattgtctctgcctg

SEQ ID NO: 257 - RNA, 23 nt, synthetic construct
  source 1..23: mol_type = other RNA
  modified_base 1: mod_base = OTHER; note = 2'-O-methyladenosine-3'-phosphorothioate
  modified_base 2: mod_base = OTHER; note = 2'-deoxy-2'-fluoroguanosine-3'-phosphorothioate
  modified_base 3: mod_base = OTHER; note = 2'-O-methylguanosine-3'-phosphate
  modified_base 4: mod_base = OTHER; note = 2'-deoxy-2'-fluoroadenosine-3'-phosphate
  modified_base 5: mod_base = OTHER; note = 2'-O-methyladenosine-3'-phosphate
  modified_base 6: mod_base = OTHER; note = 2'-deoxy-2'-fluorouridine-3'-phosphate
  modified_base 7: mod_base = OTHER; note = 2'-O-methylguanosine-3'-phosphate
  modified_base 8: mod_base = OTHER; note = 2'-deoxy-2'-fluorouridine-3'-phosphate
  modified_base 9: mod_base = OTHER; note = 2'-O-methyluridine-3'-phosphate
  modified_base 10: mod_base = OTHER; note = 2'-deoxy-2'-fluorouridine-3'-phosphate
  modified_base 11: mod_base = OTHER; note = 2'-O-methyluridine-3'-phosphate
  modified_base 12: mod_base = OTHER; note = 2'-O-methyladenosine-3'-phosphate
  modified_base 13: mod_base = OTHER; note = 2'-O-methyluridine-3'-phosphate
  modified_base 14: mod_base = OTHER; note = 2'-deoxy-2'-fluorouridine-3'-phosphate
  modified_base 15: mod_base = OTHER; note = 2'-O-methylguanosine-3'-phosphate
  modified_base 16: mod_base = OTHER; note = 2'-deoxy-2'-fluorouridine-3'-phosphate
  modified_base 17: mod_base = OTHER; note = 2'-O-methylcytidine-3'-phosphate
  modified_base 18: mod_base = OTHER; note = 2'-deoxy-2'-fluorouridine-3'-phosphate
  modified_base 19: mod_base = OTHER; note = 2'-O-methylcytidine-3'-phosphate
  modified_base 20: mod_base = OTHER; note = 2'-deoxy-2'-fluorouridine-3'-phosphate
  modified_base 21: mod_base = OTHER; note = 2'-O-methylguanosine-3'-phosphorothioate
  modified_base 22: mod_base = OTHER; note = 2'-O-methylcytidine-3'-phosphorothioate
  modified_base 23: mod_base = OTHER; note = 2'-O-methylcytidine
aggaatgttttattgtctctgcc

SEQ ID NO: 258 - RNA, 23 nt, synthetic construct
  source 1..23: mol_type = other RNA
  modified_base 1: mod_base = OTHER; note = 2'-O-methyladenosine-3'-phosphorothioate
  modified_base 2: mod_base = OTHER; note = 2'-deoxy-2'-fluoroguanosine-3'-phosphorothioate
  modified_base 3: mod_base = OTHER; note = 2'-O-methylguanosine-3'-phosphate
  modified_base 4: mod_base = OTHER; note = 2'-O-methyladenosine-3'-phosphate
  modified_base 5: mod_base = OTHER; note = 2'-O-methyladenosine-3'-phosphate
  modified_base 6: mod_base = OTHER; note = 2'-deoxy-2'-fluorouridine-3'-phosphate
  modified_base 7: mod_base = OTHER; note = 2'-O-methylguanosine-3'-phosphate
  modified_base 8: mod_base = OTHER; note = 2'-O-methyluridine-3'-phosphate
  modified_base 9: mod_base = OTHER; note = 2'-O-methyluridine-3'-phosphate
  modified_base 10: mod_base = OTHER; note = 2'-O-methyluridine-3'-phosphate
  modified_base 11: mod_base = OTHER; note = 2'-O-methyluridine-3'-phosphate
  modified_base 12: mod_base = OTHER; note = 2'-O-methyladenosine-3'-phosphate
  modified_base 13: mod_base = OTHER; note = 2'-O-methyluridine-3'-phosphate
  modified_base 14: mod_base = OTHER; note = 2'-deoxy-2'-fluorouridine-3'-phosphate
  modified_base 15: mod_base = OTHER; note = 2'-O-methylguanosine-3'-phosphate
  modified_base 16: mod_base = OTHER; note = 2'-deoxy-2'-fluorouridine-3'-phosphate
  modified_base 17: mod_base = OTHER; note = 2'-O-methylcytidine-3'-phosphate
  modified_base 18: mod_base = OTHER; note = 2'-O-methyluridine-3'-phosphate
  modified_base 19: mod_base = OTHER; note = 2'-O-methylcytidine-3'-phosphate
  modified_base 20: mod_base = OTHER; note = 2'-O-methyluridine-3'-phosphate
  modified_base 21: mod_base = OTHER; note = 2'-O-methylguanosine-3'-phosphorothioate
  modified_base 22: mod_base = OTHER; note = 2'-O-methylcytidine-3'-phosphorothioate
  modified_base 23: mod_base = OTHER; note = 2'-O-methylcytidine
aggaatgttttattgtctctgcc

SEQ ID NO: 259 - RNA, 23 nt, synthetic construct
  source 1..23: mol_type = other RNA
  modified_base 1: mod_base = OTHER; note = 2'-O-methyladenosine-3'-phosphorothioate
  modified_base 2: mod_base = OTHER; note = 2'-deoxy-2'-fluoroguanosine-3'-phosphorothioate
  modified_base 3: mod_base = OTHER; note = 2'-O-methylguanosine-3'-phosphate
  modified_base 4: mod_base = OTHER; note = 2'-O-methyladenosine-3'-phosphate
  modified_base 5: mod_base = OTHER; note = 2'-O-methyladenosine-3'-phosphate
  modified_base 6: mod_base = OTHER; note = 2'-deoxy-2'-fluorouridine-3'-phosphate
  modified_base 7: mod_base = OTHER; note = 2'-O-methylguanosine-3'-phosphate
  modified_base 8: mod_base = OTHER; note = 2'-deoxy-2'-fluorouridine-3'-phosphate
  modified_base 9: mod_base = OTHER; note = 2'-deoxy-2'-fluorouridine-3'-phosphate
  modified_base 10: mod_base = OTHER; note = 2'-O-methyluridine-3'-phosphate
  modified_base 11: mod_base = OTHER; note = 2'-O-methyluridine-3'-phosphate
  modified_base 12: mod_base = OTHER; note = 2'-O-methyladenosine-3'-phosphate
  modified_base 13: mod_base = OTHER; note = 2'-O-methyluridine-3'-phosphate
  modified_base 14: mod_base = OTHER; note = 2'-deoxy-2'-fluorouridine-3'-phosphate
  modified_base 15: mod_base = OTHER; note = 2'-O-methylguanosine-3'-phosphate
  modified_base 16: mod_base = OTHER; note = 2'-deoxy-2'-fluorouridine-3'-phosphate
  modified_base 17: mod_base = OTHER; note = 2'-O-methylcytidine-3'-phosphate
  modified_base 18: mod_base = OTHER; note = 2'-O-methyluridine-3'-phosphate
  modified_base 19: mod_base = OTHER; note = 2'-O-methylcytidine-3'-phosphate
  modified_base 20: mod_base = OTHER; note = 2'-O-methyluridine-3'-phosphate
  modified_base 21: mod_base = OTHER; note = 2'-O-methylguanosine-3'-phosphorothioate
  modified_base 22: mod_base = OTHER; note = 2'-O-methylcytidine-3'-phosphorothioate
  modified_base 23: mod_base = OTHER; note = 2'-O-methylcytidine
aggaatgttttattgtctctgcc

SEQ ID NO: 260 - RNA, 23 nt, synthetic construct
  source 1..23: mol_type = other RNA
  modified_base 1: mod_base = OTHER; note = 2'-O-methyluridine-3'-phosphorothioate
  modified_base 2: mod_base = OTHER; note = 2'-deoxy-2'-fluorouridine-3'-phosphorothioate
  modified_base 3: mod_base = OTHER; note = 2'-O-methyluridine-3'-phosphate
  modified_base 4: mod_base = OTHER; note = 2'-O-methylcytidine-3'-phosphate
  modified_base 5: mod_base = OTHER; note = 2'-O-methyladenosine-3'-phosphate
  modified_base 6: mod_base = OTHER; note = 2'-deoxy-2'-fluorocytidine-3'-phosphate
  modified_base 7: mod_base = OTHER; note = 2'-O-methyladenosine-3'-phosphate
  modified_base 8: mod_base = OTHER; note = 2'-O-methylguanosine-3'-phosphate
  modified_base 9: mod_base = OTHER; note = 2'-O-methylguanosine-3'-phosphate
  modified_base 10: mod_base = OTHER; note = 2'-O-methyladenosine-3'-phosphate
  modified_base 11: mod_base = OTHER; note = 2'-O-methyladenosine-3'-phosphate
  modified_base 12: mod_base = OTHER; note = 2'-O-methyluridine-3'-phosphate
  modified_base 13: mod_base = OTHER; note = 2'-O-methylguanosine-3'-phosphate
  modified_base 14: mod_base = OTHER; note = 2'-deoxy-2'-fluorouridine-3'-phosphate
  modified_base 15: mod_base = OTHER; note = 2'-O-methyluridine-3'-phosphate
  modified_base 16: mod_base = OTHER; note = 2'-deoxy-2'-fluorouridine-3'-phosphate
  modified_base 17: mod_base = OTHER; note = 2'-O-methyluridine-3'-phosphate
  modified_base 18: mod_base = OTHER; note = 2'-O-methyladenosine-3'-phosphate
  modified_base 19: mod_base = OTHER; note = 2'-O-methyluridine-3'-phosphate
  modified_base 20: mod_base = OTHER; note = 2'-O-methyluridine-3'-phosphate
  modified_base 21: mod_base = OTHER; note = 2'-O-methylguanosine-3'-phosphorothioate
  modified_base 22: mod_base = OTHER; note = 2'-O-methyluridine-3'-phosphorothioate
  modified_base 23: mod_base = OTHER; note = 2'-O-methylcytidine
tttcacaggaatgttttattgtc

SEQ ID NO: 261 - RNA, 23 nt, synthetic construct
  source 1..23: mol_type = other RNA
  modified_base 1: mod_base = OTHER; note = 2'-O-methyluridine-3'-phosphorothioate
  modified_base 2: mod_base = OTHER; note = 2'-deoxy-2'-fluorouridine-3'-phosphorothioate
  modified_base 3: mod_base = OTHER; note = 2'-O-methyluridine-3'-phosphate
  modified_base 4: mod_base = OTHER; note = 2'-O-methylcytidine-3'-phosphate
  modified_base 5: mod_base = OTHER; note = 2'-O-methyladenosine-3'-phosphate
  modified_base 6: mod_base = OTHER; note = 2'-deoxy-2'-fluorocytidine-3'-phosphate
  modified_base 7: mod_base = OTHER; note = 2'-O-methyladenosine-3'-phosphate
  modified_base 8: mod_base = OTHER; note = 2'-deoxy-2'-fluoroguanosine-3'-phosphate
  modified_base 9: mod_base = OTHER; note = 2'-deoxy-2'-fluoroguanosine-3'-phosphate
  modified_base 10: mod_base = OTHER; note = 2'-O-methyladenosine-3'-phosphate
  modified_base 11: mod_base = OTHER; note = 2'-O-methyladenosine-3'-phosphate
  modified_base 12: mod_base = OTHER; note = 2'-O-methyluridine-3'-phosphate
  modified_base 13: mod_base = OTHER; note = 2'-O-methylguanosine-3'-phosphate
  modified_base 14: mod_base = OTHER; note = 2'-deoxy-2'-fluorouridine-3'-phosphate
  modified_base 15: mod_base = OTHER; note = 2'-O-methyluridine-3'-phosphate
  modified_base 16: mod_base = OTHER; note = 2'-deoxy-2'-fluorouridine-3'-phosphate
  modified_base 17: mod_base = OTHER; note = 2'-O-methyluridine-3'-phosphate
  modified_base 18: mod_base = OTHER; note = 2'-O-methyladenosine-3'-phosphate
  modified_base 19: mod_base = OTHER; note = 2'-O-methyluridine-3'-phosphate
  modified_base 20: mod_base = OTHER; note = 2'-O-methyluridine-3'-phosphate
  modified_base 21: mod_base = OTHER; note = 2'-O-methylguanosine-3'-phosphorothioate
  modified_base 22: mod_base = OTHER; note = 2'-O-methyluridine-3'-phosphorothioate
  modified_base 23: mod_base = OTHER; note = 2'-O-methylcytidine
tttcacaggaatgttttattgtc

SEQ ID NO: 262 - RNA, 23 nt, synthetic construct
  source 1..23: mol_type = other RNA
  modified_base 1: mod_base = OTHER; note = 2'-O-methyluridine-3'-phosphorothioate
  modified_base 2: mod_base = OTHER; note = 2'-deoxy-2'-fluorouridine-3'-phosphorothioate
  modified_base 3: mod_base = OTHER; note = 2'-O-methyluridine-3'-phosphate
  modified_base 4: mod_base = OTHER; note = 2'-deoxy-2'-fluorocytidine-3'-phosphate
  modified_base 5: mod_base = OTHER; note = 2'-O-methyladenosine-3'-phosphate
  modified_base 6: mod_base = OTHER; note = 2'-deoxy-2'-fluorocytidine-3'-phosphate
  modified_base 7: mod_base = OTHER; note = 2'-O-methyladenosine-3'-phosphate
  modified_base 8: mod_base = OTHER; note = 2'-deoxy-2'-fluoroguanosine-3'-phosphate
  modified_base 9: mod_base = OTHER; note = 2'-O-methylguanosine-3'-phosphate
  modified_base 10: mod_base = OTHER; note = 2'-deoxy-2'-fluoroadenosine-3'-phosphate
  modified_base 11: mod_base = OTHER; note = 2'-O-methyladenosine-3'-phosphate
  modified_base 12: mod_base = OTHER; note = 2'-O-methyluridine-3'-phosphate
  modified_base 13: mod_base = OTHER; note = 2'-O-methylguanosine-3'-phosphate
  modified_base 14: mod_base = OTHER; note = 2'-deoxy-2'-fluorouridine-3'-phosphate
  modified_base 15: mod_base = OTHER; note = 2'-O-methyluridine-3'-phosphate
  modified_base 16: mod_base = OTHER; note = 2'-deoxy-2'-fluorouridine-3'-phosphate
  modified_base 17: mod_base = OTHER; note = 2'-O-methyluridine-3'-phosphate
  modified_base 18: mod_base = OTHER; note = 2'-deoxy-2'-fluoroadenosine-3'-phosphate
  modified_base 19: mod_base = OTHER; note = 2'-O-methyluridine-3'-phosphate
  modified_base 20: mod_base = OTHER; note = 2'-deoxy-2'-fluorouridine-3'-phosphate
  modified_base 21: mod_base = OTHER; note = 2'-O-methylguanosine-3'-phosphorothioate
  modified_base 22: mod_base = OTHER; note = 2'-O-methyluridine-3'-phosphorothioate
  modified_base 23: mod_base = OTHER; note = 2'-O-methylcytidine
tttcacaggaatgttttattgtc
